(19) United States
(12) Patent Application Publication
(10) Pub. No.: US 2023/0355654 A1
(43) Pub. Date: Nov. 9, 2023

(54) RNAI THERAPY FOR HEPATITIS B VIRUS INFECTION

(71) Applicant: Arrowhead Pharmaceuticals, Inc., Pasadena, CA (US)

(72) Inventors: Christine I. WOODDELL, Madison, WI (US); David B. Rozema, Cross Plains, WI (US); David L. Lewis, Madison, WI (US); Darren H. Wakefield, Fitchburg, WI (US); Lauren J. Almeida, Madison, WI (US)

(73) Assignee: Arrowhead Pharmaceuticals, Inc., Pasadena, CA (US)

(21) Appl. No.: 18/069,490

(22) Filed: Dec. 21, 2022

Related U.S. Application Data
(63) Continuation of application No. 17/016,021, filed on Sep. 9, 2020, now Pat. No. 11,534,453.
Application No. 17/016,021 is a continuation of application No. 16/148,249, filed on Oct. 1, 2018, now Pat. No. 10,806,750.
Application No. 16/148,249 is a division of application No. 15/229,314, filed on Aug. 5, 2016, now Pat. No. 10,130,651.
(60) Provisional application No. 62/370,754, filed on Aug. 4, 2016.
(60) Provisional application No. 62/202,253, filed on Aug. 7, 2015.

(51) Int. Cl. A61K 31/713; A61K 38/16; A61K 47/54; A61K 47/59

(52) U.S. Cl. CPC A61K 31/713; A61K 38/16; A61K 47/549; A61K 47/554; A61K 47/59

(57) ABSTRACT

Described are compositions and methods for inhibition of Hepatitis B virus gene expression. RNA interference (RNAi) triggers and RNAi trigger conjugates for inhibiting the expression of Hepatitis B virus gene are described. Pharmaceutical compositions comprising one or more HBV RNAi triggers optionally with one or more additional therapeutics are also described. Delivery of the described HBV RNAi triggers to infected liver in vivo provides for inhibition of HBV gene expression and treatment.

### CROSS-REFERENCE TO RELATED APPLICATIONS

[0001] The present application is a divisional of U.S. patent application Ser. No. 15/229,314, filed Aug. 5, 2016, which claims the benefit of U.S. Provisional Patent Application No. 62/370,754, filed Aug. 4, 2016, and U.S. Provisional Patent Application No. 62/202,253, filed Aug. 7, 2015, the contents of each of which are incorporated herein in their entirety.

### SEQUENCE LISTING

[0002] The present application contains a Sequence Listing which has been submitted in ASCH format and is hereby incorporated by reference in its entirety. The ASCII copy is named 30635-US2_SequenceListing and is 347 kb in size.

### BACKGROUND

[0003] The Hepatitis B Virus is a strict hepatotrophic, double-stranded DNA containing virus. Although DNA is the genetic material, the replication cycle involves a reverse transcription step to copy a pregenomic RNA into DNA. Hepatitis B virus is classified as one member of the Hepadnaviruses and belongs to the family of Hepadnaviridae. The primary infection of adult humans with Hepatitis B Virus causes an acute hepatitis with symptoms of organ inflammation, fever, jaundice and increased liver transaminases in blood. Those patients that are not able to overcome the virus infection suffer a chronic disease progression over many years with increased risk of developing cirrhotic liver or liver cancer. Perinatal transmission from Hepatitis B virus-infected mothers to newborns also leads to chronic hepatitis.

[0004] Upon uptake by hepatocytes, the nucleocapsid is transferred to the nucleus and DNA is released. There, the DNA strand synthesis is completed and gaps repaired to give the covalently closed circular (ccc) supercoiled DNA of 3.2 kb. The cccDNA serves as a template for transcription of four major viral mRNAs, which are 3.5, 2.4, 2.1 and 0.7 kb long. All mRNAs are 5′-capped and polyadenylated at the 3′-end. There is sequence overlap at the 3′-end between all four mRNAs. The 3.5 kb mRNA serves as template for core protein and polymerase production. In addition, the same transcript serves as a pre-genomic replication intermediate and allows the viral polymerase to initiate the reverse transcription into DNA. Core protein is needed for nucleocapsid formation. In addition, sequential processing activities transforms some core protein into the secretable e-antigen. The abundance of e-antigen in blood correlates with Hepatitis B Virus replication in liver and serves as an important diagnostic marker for monitoring the disease progression.

[0005] The 2.4 and 2.1 kb mRNAs carry the open reading frames pre-S1, pre-S2 and S for expression of viral large, medium and small surface antigen. The s-antigen is associated with infectious, complete particles. In addition, blood of infected patients also contain non-infectious particles derived from s-antigen alone, free of genomic DNA or polymerase. The function of these particles is not fully understood. The complete and lasting depletion of detectable s-antigen in blood is considered as a reliable indicator for Hepatitis B Virus clearance and thus, a successful cure.

[0006] The 0.7 kb mRNA encodes the X protein. This gene product is important for efficient transcription of viral genes and also acts as a transactivator on host gene expression. The latter activity seems to be important for hepatocyte transformation during development of liver cancer.

[0007] Patients with detectable s-antigen, e-antigen or viral DNA in the blood for more than 6 months are considered chronically infected. Nucleoside analogs as inhibitors of reverse transcriptase activity are typically the first treatment option for many patients. Lamivudine, Tenofovir. or Entecavir suppress Hepatitis B Virus replication, sometimes to undetectable levels. Improvement of liver function and reduction of liver inflammation are the most important benefits. However, only few patients achieve complete and lasting remission after the end of treatment. Furthermore, the Hepatitis B Virus develops drug resistance with increasing duration of treatment. This is especially difficult for patients co-infected with Hepatitis B and Human Immunodeficiency Virus. Both viruses are susceptible to nucleoside analogue drugs and may co-develop resistance.

[0008] A second treatment option is the administration of interferon-alpha. Here, patients receive high doses of interferon-alpha over a period of 6 months. The Asian genotype B gives very poor response rates. Co-infection with Hepatitis D or Human Immunodeficiency Virus has been shown to render interferon-alpha therapy completely ineffective. Patients with strong liver damage and heavy fibrotic conditions are not qualified for interferon-alpha therapy.

[0009] Despite significant advances in the field of Hepatitis B Virus treatment, there remains a need for agents that can selectively and efficiently silence the gene expression of the virus, block replication, and subsequently reduces viral burden in chronically infected patients.

### SUMMARY

[0010] Described herein are Hepatitis B Virus (HBV)-specific RNA interference (RNAi) trigger molecules (also termed RNAi agent, RNAi trigger, or trigger) able to selectively and efficiently decrease expression of HBV, and their use in mediating RNA interference to inhibit the expression of Hepatitis B Virus genes, in particular the expression of the genes related to replication or pathogenesis of Hepatitis B Virus. Each RNAi trigger includes at least a sense strand and an antisense strand. The sense strand and the antisense strand can be partially, substantially, or fully complementary to each other. The length of the RNAi trigger sense and antisense strands described herein each can be 16 to 30 nucleotides in length. In some embodiments, the sense and antisense strands are independently 17 to 26 nucleotides in length.

[0011] The sense and antisense strands can be either the same length or different lengths. The RNAi triggers described herein, upon delivery to a cell expressing HBV, inhibit the expression of one or more HBV genes in vivo. Examples of HBV RNAi trigger sense strands and antisense strands that can be used in a HBV RNAi trigger are provided in Tables 1A and 1B. Examples of HBV RNAi trigger duplexes are provided in Table 2.

[0012] An HBV RNAi trigger comprises a sense strand comprising a first sequence (passenger strand) and an antisense strand (guide strand) comprising a second sequence. In some embodiments, the sense strand comprises a core sequence which has an identity of at least 90% to at least a portion of an Hepatitis B Virus mRNA. The antisense strand comprises a nucleotide sequence which is substantially complementary to at least part of an mRNA encoding said Hepatitis B Virus gene. In some embodiments, the region of complementarity is less than 30 nucleotides in length. In some embodiments, the length of an RNAi trigger duplex length is in the range of about 16 to 30 nucleotides. In some embodiments, the length of a RNAi trigger duplex length is in the range of about 15 to 25 nucleotides. In some embodiments, an HBV RNAi trigger has a duplex length of about 18, 19, 20, 21, 22, 23 or 24 nucleotides. Exemplary sequences are provided in Tables 1A and 1B.

[0013] In some embodiments, an HBV RNAi trigger further comprises a targeting group. A targeting group can be linked to the 3′ or 5′ end of a sense strand or an antisense strand of an HBV RNAi trigger. In some embodiments, a targeting group is linked to the 3′ or 5′ end of the sense strand. In some embodiments, a targeting group is linked to the 5′ end of the sense strand. In some embodiments, a targeting group comprises a hydrophobic group having 20 or more carbon atoms. In some embodiments, the hydrophobic group comprises a cholesterol or a cholesteryl group. In some embodiments, a targeting group comprises a galactose trimer.

[0014] In some embodiments, a targeting group is linked to the trigger via a linker. Suitable linkers include, but are not limited to: —(CH₂)ₙ— wherein n is 1-10 (in some embodiments n=6. i.e., C6 as used herein) and —(O—CH₂—CH₂)ₙ— or —(CH₂—CH₂—O)ₙ— wherein n=1-10 (in some embodiments n=3, i.e., triethylene gylcol (TEG)). A linker, with or without a targeting group, can be attached to the 5′ or 3′ end of any of the sense and/or antisense strands disclosed in Tables 1A and 1B.

[0015] In some embodiments, we describe combinations of at least two HBV RNAi triggers having different sequences. In some embodiments, the two or more different HBV RNAi triggers are each linked to targeting groups. In some embodiments, the two or more different HBV RNAi triggers are each linked to cholesterol targeting groups. In some embodiments, the two or more different HBV RNAi triggers are each linked to galactose trimer targeting groups. In some embodiments, when two different triggers are used, the first trigger is linked to a cholesterol and the second trigger is linked to a galactose trimer. In some embodiments, when two or more triggers are used, the two triggers are linked to their respective targeting groups using the same or similar linkers. In some embodiments, when two or more triggers are used, the two triggers are linked to their respective targeting groups using different linkers. In some embodiments, a first targeting group is linked to a first HBV RNAi trigger via a C6 linker and a second targeting group is linked to a second HBV RNAi trigger via a TEG linker. In some embodiments, the first and second targeting groups are both comprised of or consist of cholesterol or cholesteryl groups. In some embodiments, the first and second targeting groups are both comprised of or consist of galactose trimers or galactose tetramers. The use of different linkers can provide for improved differentiation and quantitative analysis of the triggers.

[0016] In some embodiments, compositions for delivering an HBV RNAi trigger to a liver cell in vivo are described, comprising: an HBV RNAi trigger conjugated to a targeting group. In some embodiments, the targeting group is a galactose trimer or a cholesterol.

[0017] In some embodiments, compositions for delivering an HBV RNAi trigger to a liver cell in vivo are described, comprising: a) an asialoglycoprotein receptor (ASGPr)-targeted reversibly masked melittin-like peptide (MLP), i.e. MLP delivery peptide (or simply delivery peptide), and b) an HBV RNAi trigger conjugated to a hydrophobic group containing at least 20 carbon atoms (RNA-conjugate), such as, but no limited to, a cholesterol or cholesteryl group. The MLP delivery peptide and the RNAi trigger-conjugate are synthesized separately, and may be supplied in separate containers or a single container. In some embodiments, the HBV RNAi trigger is not conjugated to the delivery peptide.

[0018] In some embodiments, we describe compositions for inhibiting expression of a Hepatitis B Virus gene, comprising: a) MLP-(L-T)ₓ wherein, -L-T has the structure represented by —CO—C(CH₃)═C(T)-COOH or —CO—C(T)═C(CH₃)—COOH, wherein T comprises a targeting ligand having affinity for the an asialoglycoprotein receptor, and x is greater than 80% of the number of primary amines of a population of MLPs, b) a first HBV RNAi trigger comprising an antisense strand and a sense strand wherein the antisense strand comprises nucleotides 2-15, 2-19, 1-17, 1-21, or 1-26 of any of the antisense sequences provided in Table 1A, and the sense strand comprises any of the corresponding sense sequences provides in Table 1B covalently linked to a cholesteryl group via a TEG group, and c) a second HBV RNAi trigger comprising an antisense strand and a sense strand wherein the antisense strand comprises nucleotides 2-15, 2-19, 1-17, 1-21, or 1-26 of any of the antisense sequences provided in Table 1A, and the sense strand comprises any of the corresponding sense sequences provided in Table 1B covalently linked to a cholesteryl group via a C6 group. In some embodiments, any of the sense strand nucleotide sequences provided in Table 1B can have a Chol-TEG or Chol-C6 5′ or 3′ modification.

[0019] In some embodiments, one or more of the described HBV RNAi triggers and optionally an MLP delivery peptide are administered to a mammal in a pharmaceutically acceptable carrier or diluent. In some embodiments, the mammal is a human. In some embodiments, the RNAi trigger and delivery peptide are combined in a solution prior to administration to the mammal. In some embodiments, a delivery peptide and an RNAi trigger are co-administered to the mammal in separate solutions. In some embodiments, a delivery peptide and an RNAi trigger are administered to the mammal sequentially. For sequential administration, the delivery peptide may be administered prior to administration of the RNAi trigger. Alternatively, for sequential administration, the RNAi trigger may be administered prior to administration of the delivery peptide.

[0020] The use of Hepatitis B Virus RNAi triggers provide methods for therapeutic and/or prophylactic treatment of diseases/disorders which are associated with HBV infection. The described HBV RNAi triggers mediate RNA interference to inhibit the expression of one or more genes necessary for replication and/or pathogenesis of Hepatitis B Virus. In particular, HBV RNAi triggers inhibition viral polymerase, core protein, surface antigen, e-antigen and/or the X protein, in a cell, tissue or mammal. HBV RNAi triggers can be used to treat hepatitis B virus infection. HBV RNAi triggers can also be used to treat or prevent chronic liver diseases/disorders, inflammations, fibrotic conditions and proliferative disorders, like cancers, associated with hepatitis B virus infection. In some embodiments, the sequence is at least 13 contiguous nucleotides in length. Such methods comprise administration of HBV RNAi trigger to a human being or animal infected with HBV. Further, compositions for delivery of HBV RNAi triggers to liver cells in vivo are described.

[0021] In some embodiments, the described HBV RNAi triggers are optionally combined with one or more additional (i.e., second, third, etc.) therapeutics. A second therapeutic can be another HBV RNAi trigger (e.g., a HBV RNAi trigger which targets a different sequence within the HBV genome). An additional therapeutic can also be a small molecule drug, antibody, antibody fragment, and/or vaccine. The HBV RNAi triggers, with or without the one or more additional therapeutics, can be combined with one or more excipients to form pharmaceutical compositions.

[0022] The pharmaceutical compositions comprising one or more HBV RNAi triggers can be administered in a number of ways depending upon whether local or systemic treatment is desired. Administration can be, but is not limited to, intravenous, intraarterial, subcutaneous, intraperitoneal, subdermal (e.g., via an implanted device), and intraparenchymal administration.

[0023] The described HBV RNAi triggers and/or compositions can be used in methods for therapeutic treatment of HBV infection or disease or conditions caused by HBV infection. Such methods comprise administration of an HBV RNAi trigger as described herein to a subject, e.g., a human or animal subject.

[0024] Unless otherwise defined, all technical and scientific terms used herein have the same meaning as commonly understood by one of ordinary skill in the art to which this invention belongs. Although methods and materials similar or equivalent to those described herein can be used in the practice or testing of the present invention, suitable methods and materials are described below. All publications, patent applications, patents, and other references mentioned herein are incorporated by reference in their entirety. In case of conflict, the present specification, including definitions, will control. In addition, the materials, methods, and examples are illustrative only and not intended to be limiting.

[0025] Further objects, features, and advantages will be apparent from the following detailed description when taken in conjunction with the accompanying drawings.

### BRIEF DESCRIPTION OF THE FIGURES

[0026] FIG. 1. Chemical structures representing HBV RNAi trigger targeting groups and linking groups.

[0027] FIG. 2. Chemical structures representing HBV RNAi trigger targeting groups and linking groups.

[0028] FIG. 3 Graph illustrating (A) blood urea nitrogen (BUN) levels and (B) creatinine levels in primates treated with reversibly modified MLP delivery peptides and RNAi trigger-cholesterol conjugates.

[0029] FIG. 4. Graph illustrating (A) aspartate aminotransferase (AST) levels and (B) alanine transaminase (ALT) levels in primates treated with reversibly modified MLP delivery peptides and RNAi trigger-cholesterol conjugates.

[0030] FIG. 5. Graphs showing serum HBV DNA in pHBV mice following co-administration of 3 mg/kg MLP delivery peptide plus (A) 1.5 mg/kg AD01385 or 1.5 mg/kg AD01386 or (B) 1.5 mg/kg AD01385+1.5 mg/kg AD01386.

[0031] FIG. 6. Graphs showing Serum HBsAg in chimpanzee 95A010 following co-administration of (A) 2 mg/kg MLP delivery peptide, lmg/kg AD0009 and 1 mg/kg AD0010; or (B) 2 mg/kg MLP delivery peptide, 1 mg/kg AD01386 and 1 mg/kg AD01385.

[0032] FIG. 7. HPLC Chromatographs of (A) AM02312-AS, (B) AM02315-AS, and (C) AM02312-AS+AM02315-AS.

[0033] FIG. 8. HPLC Chromatographs of (A) AM02316-SS (TEG), (B) AM02319-SS (TEG), and (C) AM02320-SS (C6).

[0034] FIG. 9. HPLC Chromatographs of (A) AM02323-SS (C6), (B) AM02320-SS (C6)+AM02323-SS (C6), and (C) AM02319-SS (TEG)+AM02316-SS (TEG).

[0035] FIG. 10. HPLC Chromatographs of (A) AM02320-SS (C6)+AM02319 (TEG), (B) AM02323-SS (C6)+AM02316-SS (TEG), and (C) AM02320-SS (C6)/AM02312-AS+AM02323-SS (C6)/AM02315-AS.

[0036] FIG. 11. HPLC Chromatographs of (A) AM2316-SS (TEG)/AM02312-AS+AM02319-SS (TEG)/AM02315-AS, (B) AM02320-SS (C6)/AM02312-AS+AM02319-SS (TEG)/AM02315-AS, and (C) AM02316-SS (TEG)+AM02312-AS+AM02323-SS (C6)/AM02315-AS.

### DETAILED DESCRIPTION

[0037] Described herein are RNAi triggers for inhibiting expression of the Hepatitis B Virus (referred to herein as HBV RNAi triggers). Each HBV RNAi trigger comprises a sense strand and an antisense strand. The sense strand and the antisense strand are partially, substantially, or fully complementary to each other. In some embodiments, the length of the herein described RNAi trigger sense and antisense strands are independently 16 to 30 nucleotides in length. In some embodiments, the length of the herein described RNAi trigger sense and antisense strands are independently 17 to 26 nucleotides in length. In some embodiments, the herein described RNAi trigger sense and antisense strands are independently 17, 18, 19, 20, 21, 22, 23, 24, 25, or 26 nucleotides in length. The sense and antisense strands can be either the same length or they can be different lengths. In some embodiments, the sense strand is about 19 nucleotides in length while the antisense strand is about 21 nucleotides in length. In some embodiments, the sense strand is about 21 nucleotides in length while the antisense strand is about 23 nucleotides in length. In other embodiments, the sense and antisense strands are independently 17-21 nucleotides in length. In some embodiments, both the sense and antisense strands are each 21-26 nucleotides in length. In some embodiments, both the sense and antisense strands are each 26 nucleotides in length. Examples of nucleotide sequences used in forming HBV RNAi trigger molecules are provided in Tables 1A and 1B.

[0038] An HBV RNAi trigger comprises a sense strand and an antisense strand each containing a core sequence of 16-23 nucleobases in length. An antisense strand core sequence is 100% (perfectly) complementary or at least 90% (substantially) complementary to a nucleotide sequence (sometimes referred to as a “target sequence”) present in the HBV mRNA. A sense strand core sequence is 100% (perfectly) complementary or at least 90% (substantially) complementary to a sequence in the antisense strand, and thus the sense strand core sequence is perfectly identical or at least 90% identical to a nucleotide sequence (target sequence) present in the HBV mRNA. A sense strand core sequence can be the same length as a corresponding antisense core sequence or it can be a different length. In some embodiments, the antisense strand core sequence is 16, 17, 18, 19, 20, 21, 22, or 23 nucleotides in length. In some embodiments, the sense strand core sequence is 16, 17, 18, 19, 20, 21, 22, or 23 nucleotides in length.

[0039] The HBV RNAi trigger sense and antisense strands typically anneal to form a duplex Within the complementary duplex region, the sense strand core sequence is at least 90% complementary or 100% complementary to the antisense core sequence. In some embodiments, the sense strand core sequence contains a sequence of at least 16, at least 17, at least 18, at least 19, at least 20, or at least 21 nucleotides that is at least 90% or 100% complementary to a corresponding 16, 17, 18, 19, 20, or 21 nucleotide sequence of the antisense strand core sequence (i e, the sense strand and antisense core sequences of an HBV RNAi trigger have a region of at least 16, at least 17, at least 18, at least 19, at least 20, or at least 21 nucleotides that is at least 9% base paired or 100% base paired.) RNAi triggers include, but are not limited to: short interfering RNAs (siRNAs), double-strand RNAs (dsRNA), micro RNAs (miRNAs), short hairpin RNAs (shRNA), and dicer substrates (e.g., U.S. Pat. Nos. 8,084,599, 8,349,809, and 8,513,207). The RNAi triggers described herein, upon delivery to a cell expressing an HBV gene, inhibit or knockdown expression of one or more HBV genes in vivo through the biological process of RNA interference (RNAi).

[0040] As used herein, the term “sequence” or “nucleotide sequence” refers to a succession or order of nucleobases, nucleotides, and/or nucleosides, described with a succession of letters using the standard nucleotide nomenclature and the key for modified nucleotides described herein.

[0041] The sense strand and/or the antisense strand may optionally and independently contain an additional 1, 2, 3, 4, 5, or 6 nucleotides (extension) at the 3′ end, the 5′ end, or both the 3′ and 5′ ends of the core sequences. The antisense strand additional nucleotides, if present, may or may not be complementary to the corresponding sequence in the HBV mRNA. The sense strand additional nucleotides, if present, may or may not be identical to the corresponding sequence in the HBV mRNA. The antisense strand additional nucleotides, if present, may or may not be complementary to the corresponding sense strand's additional nucleotides, if present.

[0042] As used herein, an extension comprises 1, 2, 3, 4, 5, or 6 nucleotides at the 5′ and/or 3′ end of the sense strand core sequence and/or antisense strand core sequence. The extension nucleotides on a sense strand may or may not be complementary to nucleotides, either core sequence nucleotides or extension nucleotides, in the corresponding antisense strand. Conversely, the extension nucleotides on an antisense strand may or may not be complementary to nucleotides, either core sequence nucleotides or extension nucleotides, in the corresponding sense strand. In some embodiments, both the sense strand and the antisense strand of an RNAi trigger contain 3′ and 5′ extensions. In some embodiments, one or more of the 3′ extension nucleotides of one strand base pairs with one or more 5′ extension nucleotides of the other strand. In other embodiments, one or more of 3′ extension nucleotides of one strand do not base pair with one or more 5′ extension nucleotides of the other strand. In some embodiments, an HBV RNAi trigger has an antisense strand having a 3′ extension and a sense strand having a 5′ extension.

[0043] The HBV RNAi triggers described herein are formed by annealing an antisense strand with a sense strand. In some embodiments, an HBV RNAi trigger antisense strand comprises a nucleotide sequence of any of the sequences in Table 1A. In some embodiments, an HBV RNAi trigger antisense strand comprises the sequence of nucleotides 1-17, 2-15, 2-17, 1-18, 2-18, 1-19, 2-19, 1-20, 2-20, 1-21, 2-21, 1-22, 2-22, 1-23, 2-23, 1-24, 2-24, 1-25, 2-25, 1-26, or 2-26 of any of the sequences in Table 1A. In some embodiments, an HBV RNAi trigger sense strand comprises the nucleotide sequence of any of the sequences in Table 1B. In some embodiments, an HBV RNAi trigger sense strand comprises the sequence of nucleotides 1-18, 1-19, 1-20, 1-21, 1-22, 1-23, 1-24, 1-25, 1-26, 2-19, 2-20, 2-21, 2-22, 2-23, 2-24, 2-25, 2-26, 3-20, 3-21, 3-22, 3-23, 3-24, 3-25, 3-26, 4-21, 4-22, 4-23, 4-24, 4-25, 4-26, 5-22, 5-23, 5-24, 5-25, 5-26, 6-23, 6-24, 6-25, 6-26, 7-24, 7-25, 7-25, 8-25, 8-26 of any of the sequences in Table 1B.

[0044] In some embodiments, the sense and antisense strands of the RNAi triggers described herein contain the same number of nucleotides. In some embodiments the sense and antisense strands of the RNAi triggers described herein contain different numbers of nucleotides. In some embodiments, the sense strand 5′ end and the antisense strand 3′ end of an RNAi trigger form a blunt end. In some embodiments, the sense strand 3′ end and the antisense strand 5′ end of an RNAi trigger form a blunt end. In some embodiments, both ends of an RNAi trigger form a blunt end. In some embodiments, neither end of an RNAi trigger is blunt-ended. As used herein a blunt end refers to an end of a double stranded trigger molecule in which the terminal nucleotides of the two annealed strands are complementary (form a complementary base-pair). In some embodiments, the sense strand 5′ end and the antisense strand 3′ end of an RNAi trigger form a frayed end. In some embodiments, the sense strand 3′ end and the antisense strand 5′ end of an RNAi trigger form a frayed end. In some embodiments, both ends of an RNAi trigger form a frayed end. In some embodiments, neither end of an RNAi trigger is a frayed end. As used herein a frayed end refers to an end of a double stranded trigger molecule in which the terminal nucleotides of the two annealed strands from a pair (i.e. do not form an overhang) but are not complementary (i.e. form a non-complementary pair). As used herein, an overhang is a stretch of one or more unpaired nucleotides at the end of one strand of a double stranded RNAi trigger molecule. The unpaired nucleotides may be on the sense strand or the antisense strand, creating either 3′ or 5′ overhangs. In some embodiments the RNAi trigger molecule contains: a blunt end and a frayed end, a blunt end and 5′ overhang end, a blunt end and a 3′ overhang end, a frayed end and a 5′ overhand end, a frayed end and a 3′ overhang end, two 5′ overhang ends, two 3′ overhang ends, a 5′ overhang end and a 3′ overhand end, two frayed ends, or two blunt ends.

[0045] A nucleotide base (or nucleobase) is a heterocyclic pyrimidine or purine compound which is a constituent of all nucleic acids and includes adenine (A), guanine (G), cytosine (C), thymine (T), and uracil (U). As used herein, “G”, “g”, “C”, “c”, “A”, “a”, “U”, “u”, and “T”, each generally stand for a nucleobase, nucleoside, nucleotide or nucleotide mimic that contains guanine, cytosine, adenine, uracil and thymidine as a base. Also as used herein, the term “nucleotide” can include a modified nucleotide or nucleotide mimic, abasic site, or a surrogate replacement moiety.

[0046] As used herein, a “modified nucleotide” is a nucleotide other than a ribonucleotide (2′-hydroxyl nucleotide). In some embodiments, an HBV RNAi trigger contains one or more modified nucleotides. In some embodiments, at least 50%, at least 60%, at least 70%, at least 80%, at least 90%, at least 95%, or 100% of the nucleotides are modified. Modified nucleotides include, but are not limited to, deoxynucleotides, nucleotide mimics, abasic nucleotides (represented herein as X or Ab), 2′-modified nucleotides, 3′ to 3′ linkages (inverted) nucleotides (represented herein as invdN, invN, invn, invX), non-natural base-comprising nucleotides, bridged nucleotides, peptide nucleic acids, 2′,3′-seco nucleotide mimics (unlocked nucleobase analogues, represented herein as N_{UNA} or NUNA), locked nucleotides (represented herein as N_{LNA} or NLNA), 3′-O-Methoxy (2′ internucleotide linked) nucleotides (represented herein as 3′-OMen), 2′-F-Arabino nucleotides (represented herein as NfANA or Nf_{ANA}), morpholino nucleotides, vinyl phosphonate deoxyribonucleotides (represented herein as vpdN), and vinyl phosphonate nucleotides (represented herein as vpN), 2′-modified nucleotides (i.e. anucleotide with a group other than a hydroxyl group at the 2′ position of the five-membered sugar ring) include, but are not limited to, 2′-O-methyl nucleotides (represented herein as a lower case letter ‘n’ in a nucleotide sequence), 2′-deoxy-2′-fluoro nucleotides (represented herein as Nf, also represented herein as 2′-fluoro nucleotide), 2′-deoxy nucleotides (represented herein as dN), 2′-methoxyethyl (2′-O-2-methoxylethyl) nucleotides (represented herein as NM or 2′-MOE), 2′-amino nucleotides, and 2′-alkyl nucleotides. It is not necessary for all positions in a given compound to be uniformly modified. Conversely, more than one modification may be incorporated in a single HBV RNAi trigger or even in a single nucleotide thereof. The HBV RNAi trigger sense strands and antisense strands may be synthesized and/or modified by methods known in the art. Modification at one nucleotide is independent of modification of another nucleotide.

[0047] Modified nucleotides also include nucleotides having modified nucleobases. Modified nucleobases include, but are not limited to, synthetic and natural nucleobases, 5-substituted pyrimidines, 6-azapyrimidines and N-2, N-6 and 0-6 substituted purines, including 2-aminopropyladenine, 5-propynyluracil and 5-propynylcytosine, 5-methylcytosine (5-me-C), 5-hydroxymethyl cytosine, xanthine, hypoxanthine, 2-aminoadenine, 6-methyl and other alkyl derivatives of adenine and guanine, 2-propyl and other alkyl derivatives of adenine and guanine, 2-thiouracil, 2-thiothymine and 2-thiocytosine, 5-halouracil and cytosine, 5-propynyl uracil and cytosine, 6-azo uracil, cytosine and thymine, 5-uracil (pseudouracil), 4-thiouracil, 8-halo, 8-amino, 8-thiol, 8-thioalkyl, 8-hydroxyl and other 8-substituted adenines and guanines, 5-halo particularly 5-bromo, 5-trifluoromethyl and other 5-substituted uracils and cytosines, 7-methylguanine and 7-methyladenine, 8-azaguanine and 8-azaadenine, 7-deazaguanine and 7-deazaadenine and 3-deazaguanine and 3-deazaadenine.

[0048] In some embodiments, one or more nucleotides of an HBV RNAi trigger are linked by non-standard linkages or backbones (i.e. modified internucleoside linkages or modified backbones). In some embodiments, a modified internucleoside linkage is a non-phosphate-containing covalent internucleoside linkage. Modified internucleoside linkages or backbones include, but are not limited to, phosphorothioates, 5′-phosphorothioate group (represented herein as a lower case's′ before a nucleotide, as in sN, sn, sNf, or sdN), chiral phosphorothioates, thiophosphate, phosphorodithioates, phosphotriesters, aminoalkyl-phosphotriesters, methyl and other alkyl phosphonates including 3′-alkylene phosphonates and chiral phosphonates, phosphinates, phosphoramidates including 3′-amino phosphoramidate and aminoalkylphosphoramidates, thionophosphoramidates, thionoalkyl-phosphonates, thionoalkylphosphotriesters, morpholino linkages, and boranophosphates having normal 3′-5′ linkages, 2′-5′ linked analogs of these, and those having inverted polarity wherein the adjacent pairs of nucleoside units are linked 3′-5′ to 5′-3′ or 2′-5′ to 5′-2′. In other embodiments, a modified internucleoside linkage or backbone lacks a phosphorus atom. Modified internucleoside linkages lacking a phosphorus atom include, but are not limited to, short chain alkyl or cycloalkyl inter-sugar linkages, mixed heteroatom and alkyl or cycloalkyl inter-sugar linkages, or one or more short chain heteroatomic or heterocyclic inter-sugar linkages. In some embodiments, modified internucleoside backbones include, but are not limited to, siloxane backbones, sulfide, sulfoxide and sulfone backbones; formacetyl and thioformacetyl backbones, methylene formacetyl and thioformacetyl backbones, alkene containing backbones, sulfamate backbones, methyleneimino and methylenehydrazino backbones, sulfonate and sulfonamide backbones, amide backbones, and others having mixed N, O, S, and CH₂ component parts.

[0049] In some embodiments, an HBV RNAi trigger contains one or more modified nucleotides and one or more modified internucleoside linkages. In some embodiments, a 2′-modified nucleotide is combined with modified internucleoside linkage. For example, in some embodiments, a sense strand of an HBV RNAi trigger can contain 1, 2, 3, or 4 phosphorothioate linkages; an antisense strand of a HBV RNAi trigger can contain 1, 2, 3, or 4 phosphorothioate linkages; or both the sense strand and the antisense strand can independently contain 1, 2, 3, or 4 phosphorothioate linkages.

[0050] In some embodiments, a chemically-modified HBV RNAi trigger comprises a duplex having two strands, one or both of which can be chemically-modified, wherein each strand is about 17 to about 29 nucleotides. In some embodiments, an HBV RNAi trigger comprises one or more modified nucleotides while maintaining the ability to mediate RNAi inside a cell or reconstituted in vitro system. An HBV RNAi trigger can be modified wherein the chemical modification comprises one or more (e.g., about 1, 2, 3, 4, 5, 6, 7, 8, 9, 10, or more) of the nucleotides. In some embodiments, an HBV RNAi trigger comprises modified nucleotides as a percentage of the total number of nucleotides present in the HBV RNAi trigger. As such, an HBV RNAi trigger can generally comprise modified nucleotides from about 5% to about 100% of the nucleotide positions (e.g., about 5%, 10%, 15%, 20%, 25%, 30%, 35%, 40%, 45%, 50%, 55%, 60%, 65%, 70%, 75%, 80%, 85%, 90%, 95% or 100% of the nucleotide positions). The actual percentage of modified nucleotides present in a given HBV RNAi trigger depends on the total number of nucleotides present in the HBV RNAi trigger. The percent modification can be based upon the total number of nucleotides present in the sense strand, antisense strand, or both the sense and antisense strands. In addition, the actual percentage of modified nucleotides present in a given HBV RNAi trigger can also depend on the total number of purine and pyrimidine nucleotides present in the HBV RNAi trigger. For example, wherein all pyrimidine nucleotides and/or all purine nucleotides present in the HBV RNAi trigger are modified.

[0051] Representative HBV RNAi triggers are represented by the Duplex ID Nos, shown in Table 2. In some embodiments, an HBV RNAi trigger consists of any of the Duplex ID Nos, presented herein. In some embodiments an HBV RNAi trigger comprises of any of the Duplex ID Nos, presented herein. In some embodiments, an HBV RNAi trigger comprises the sense strand and antisense strand nucleotide sequences of any of the Duplex ID Nos, presented herein. In some embodiments, an HBV RNAi trigger comprises the sense strand and antisense strand nucleotide sequences of any of the Duplex ID Nos, presented herein and a targeting group and/or linking group wherein the targeting group and/or linking group is covalently linked to the sense strand or the antisense strand. In some embodiments, an HBV RNAi trigger comprises the sense strand and antisense strand modified nucleotide sequences of any of the Duplex ID Nos, presented herein. In some embodiments, an HBV RNAi trigger comprises the sense strand and antisense strand modified nucleotide sequences of any of the Duplex ID Nos, presented herein and a targeting group and/or linking group wherein the targeting group and/or linking group is covalently linked to the sense strand or the antisense strand. In some embodiments, an HBV RNAi trigger contains or is conjugated to a targeting group, linking group, delivery polymer, delivery vehicle, and/or other non-nucleotide group. The targeting group, linking group, delivery polymer, delivery vehicle, and/or other non-nucleotide group can be covalently linked to the 3′ and/or 5′ end of either the sense strand and/or the antisense strand. In some embodiments, an HBV RNAi trigger comprises a targeting group, linking group, delivery polymer, delivery vehicle, or other non-nucleotide group linked to the 3′ and/or 5′ end of the sense strand. In some embodiments, a targeting group, linking group, delivery polymer, delivery vehicle, or other non-nucleotide group is linked to the 5′ end of an HBV RNAi trigger sense strand. In some embodiments, a targeting group, linking group, delivery polymer, delivery vehicle, and/or other non-nucleotide group is linked directly or indirectly to the trigger via a linker/linking group. In some embodiments, a targeting group, linking group, delivery polymer, delivery vehicle, and/or other non-nucleotide group is linked to the RNAi trigger sense strand and/or antisense strand via a labile, cleavable, or reversible bond or linker.

[0052] A targeting group can enhance the pharmacokinetic or biodistribution properties of an RNAi trigger or conjugate to which it is attached to improve cell- or tissue-specific distribution and cell-specific uptake of the conjugate. In some instances, binding of a targeting group to a cell or cell receptor may initiate endocytosis. A targeting group can be monovalent, divalent, trivalent, tetravalent, or have higher valency. Representative targeting groups include, without limitation, compounds with affinity to cell surface molecule, cell receptor ligands, hapten, antibodies, monoclonal antibodies, antibody fragments, and antibody mimics with affinity to cell surface molecules.

[0053] Unmodified HBV RNAi trigger sense strand and antisense strand sequences are provided in Tables 1A and 1B. In forming HBV RNAi triggers, each of the nucleotides in each of the unmodified sequences listed in Tables 1A and 1B may be a modified nucleotide. Non-limiting examples of antisense and sense strands containing modified nucleotides are also provided in Tables 1A and 1B. In Tables 1A and 1B, the following notations are used to indicate modified nucleotides: N=2′-OH (unmodified) ribonucleotide (capital letter without f or d indication); n=2′-O-methyl (2′-OMe) nucleotide; Nf=2′-deoxy-2′-fluoro nucleotide (also termed 2′-fluoro modified nucleotide); dN=2′-deoxy nucleotide (deoxynucleotide); N_{UNA}=2′,3′-seco nucleotide mimics (unlocked nucleobase analogs); NM=2′-methoxyethyl nucleotide (also shown as 2′-MOE); (invdN)=3′-3′ linked (inverted) deoxyribonucleotide (3′-3′ linked nucleotide); (invAb)=3′-3′ linked (inverted) abasic nucleotide (also shown as (invX)); x=abasic site; s=phosphorothioate linked nucleotide; p=phosphate; vp=vinyl phosphonate containing nucleotide.

TABLE 1A
HBV RNAi trigger antisense strand sequences.

| | | SEQ ID | | SEQ ID |
|---|---|---|---|---|
| AS strand ID | Modified sequence (5′ → 3′) | NO. | Unmodified sequence (5′ → 3′) | NO. |
| AM00006-AS | dTAfcCfaAfuUfuAfuGfcCfuAfcAfgdTsdT | 210 | TACCAAUUUAUGCCUACAGTT | 1 |
| AM00008-AS | dTAfuGfaUfaAfaAfcGfcCfgCfaGfadTsdT | 211 | TAUGAUAAAACGCCGCAGATT | 2 |
| AM00010-AS | dTAfgAfuGfaUfuAfgGfcAfgAfgGfudTsdT | 212 | TAGAUGAUUAGGCAGAGGUTT | 3 |
| AM00139-AS | dTAfcAfaAfuGfgCfaCfuAfgUfaAfadTsdT | 213 | TACAAAUGGCACUAGUAAATT | 4 |
| AM00194-AS | dTAfcCfaA_{UNA}uUfuAfuGfcCfuAfcAfgdTsdT | 214 | TACCAAUUUAUGCCUACAGTT | 1 |
| AM00195-AS | dTAfcCfaAfU_{UNA}UfuAfuGfcCfuAfcAfgdTsdT | 215 | TACCAAUUUAUGCCUACAGTT | 1 |
| AM00438-AS | dTAfgAfuGUNAaUfuAfgGfcAfgAfgGfudTsdT | 216 | TAGAUGAUUAGGCAGAGGUTT | 3 |
| AM00439-AS | dTAfgAfuGfAUNAUfuAfgGfcAfgAfgGfudTsdT | 217 | TAGAUGAUUAGGCAGAGGUTT | 3 |
| AM01463-AS | pdTAfcCfaAfuUfuAfuGfcCfuAfcAfgdTsdT | 218 | TACCAAUUUAUGCCUACAGTT | 1 |
| AM01464-AS | pdTAfgAfuGfaUfuAfgGfcAfgAfgGfudTsdT | 219 | TAGAUGAUUAGGCAGAGGUTT | 3 |
| AM01933-AS | dTAfcCfaAUNAuUfuAfugcCfuAfcAfgdTsdT | 220 | TACCAAUUUAUGCCUACAGTT | 1 |
| AM01935-AS | dTsAfscCfaAUNAuUfuAfugcCfuAfcAfgsdTsdT | 221 | TACCAAUUUAUGCCUACAGTT | 1 |
| AM01937-AS | dTAfgAfuGfAUNAUfuAfggcAfgAfgGfudTsdT | 222 | TAGAUGAUUAGGCAGAGGUTT | 3 |
| AM01938-AS | dTsAfsgAfuGfAUNAUfuAfggcAfgAfgGfusdTsdT | 223 | TAGAUGAUUAGGCAGAGGUTT | 3 |
| AM01942-AS | dTAfcAfaAUNAuGfgCfaCfuAfgUfaAfadTsdT | 224 | TACAAAUGGCACUAGUAAATT | 4 |
| AM01943-AS | dTAfcAfaAfUUNAGfgCfaCfuAfgUfaAfadTsdT | 225 | TACAAAUGGCACUAGUAAATT | 4 |
| AM01944-AS | dTAfcAfaAUNAuGfgCfacuAfgUfaAfadTsdT | 226 | TACAAAUGGCACUAGUAAATT | 4 |
| AM01945-AS | dTsAfscAfaAUNAuGfgCfacuAfgUfaAfasdTsdT | 227 | TACAAAUGGCACUAGUAAATT | 4 |
| AM01946-AS | dTAfcAfaAfUUNAGfgCfacuAfgUfaAfadTsdT | 228 | TACAAAUGGCACUAGUAAATT | 4 |
| AM01947-AS | dTsAfscAfaAfUUNAGfgCfacuAfgUfaAfasdTsdT | 229 | TACAAAUGGCACUAGUAAATT | 4 |
| AM01985-AS | dTAfuGfaUUNAaAfaAfcGfcCfgCfaGfadTsdT | 230 | TAUGAUAAAACGCCGCAGATT | 2 |
| AM01986-AS | dTAfuGfaUfAUNAAfaAfcGfcCfgCfaGfadTsdT | 231 | TAUGAUAAAACGCCGCAGATT | 2 |
| AM01987-AS | dTAfuGfaUUNAaAfaAfcgcCfgCfaGfadTsdT | 232 | TAUGAUAAAACGCCGCAGATT | 2 |
| AM01988-AS | dTsAfsuGfaUUNAaAfaAfcgcCfgCfaGfasdTsdT | 233 | TAUGAUAAAACGCCGCAGATT | 2 |
| AM01989-AS | dTAfuGfaUfAUNAAfaAfcgcCfgCfaGfadTsdT | 234 | TAUGAUAAAACGCCGCAGATT | 2 |
| AM01990-AS | dTsAfsuGfaUfAUNAAfaAfcgcCfgCfaGfasdTsdT | 235 | TAUGAUAAAACGCCGCAGATT | 2 |
| AM02276-AS | dTsAfscCfaAfuUfuAfuGfcCfuAfcAfgsdTsdT | 236 | TACCAAUUUAUGCCUACAGTT | 1 |
| AM02277-AS | dTsAfscCfaAfuUfuAfugcCfuAfcAfgsdTsdT | 237 | TACCAAUUUAUGCCUACAGTT | 1 |
| AM02280-AS | dTsAfsgAfuGfaUfuAfgGfcAfgAfgGfusdTsdT | 238 | TAGAUGAUUAGGCAGAGGUTT | 3 |
| AM02281-AS | dTsAfsgAfuGfaUfuAfggcAfgAfgGfusdTsdT | 239 | TAGAUGAUUAGGCAGAGGUTT | 3 |
| AM02286-AS | dTsAfscAfaAfuGfgCfaCfuAfgUfaAfasdTsdT | 240 | TACAAAUGGCACUAGUAAATT | 4 |
| AM02287-AS | dTsAfscAfaAfuGfgCfacuAfgUfaAfasdTsdT | 241 | TACAAAUGGCACUAGUAAATT | 4 |
| AM02288-AS | dTsAfsuGfaUfaAfaAfcGfcCfgCfaGfasdTsdT | 242 | TAUGAUAAAACGCCGCAGATT | 2 |
| AM02289-AS | dTsAfsuGfaUfaAfaAfcgcCfgCfaGfasdTsdT | 243 | TAUGAUAAAACGCCGCAGATT | 2 |
| AM02312-AS | dTAfcCfaAfuUfuAfugcCfuAfcAfgdTsdT | 244 | TACCAAUUUAUGCCUACAGTT | 1 |
| AM02313-AS | dTAfgAfuGfaUfuAfggcAfgAfgGfudTsdT | 245 | TAGAUGAUUAGGCAGAGGUTT | 3 |
| AM02314-AS | dTAfcAfaAfuGfgCfacuAfgUfaAfadTsdT | 246 | TACAAAUGGCACUAGUAAATT | 4 |
| AM02315-AS | dTAfuGfaUfaAfaAfcgcCfgCfaGfadTsdT | 247 | TAUGAUAAAACGCCGCAGATT | 2 |
| AM02366-AS | dTsAfscCfaAfuUfuAfugCfCfuAfcAfgGfccsUfsUfAu | 248 | TACCAAUUUAUGCCUACAGGCCUUAU | 5 |
| AM02367-AS | dTsAfcCfaAfuUfuAfugCfCfuAfcAfgGfccUfsUfAu | 249 | TACCAAUUUAUGCCUACAGGCCUUAU | 5 |
| AM02368-AS | dTsAfscCfaAfuUfuAfugCfcuAfcAfgGfccsUfsUfAu | 250 | TACCAAUUUAUGCCUACAGGCCUUAU | 5 |
| AM02369-AS | dTsAfcCfaAfuUfuAfugCfcuAfcAfgGfccUfsUfAu | 251 | TACCAAUUUAUGCCUACAGGCCUUAU | 5 |
| AM02374-AS | dTsAfsuGfaUfaAfaAfcgCfCfgCfaGfaCfacsAfsUfAu | 252 | TAUGAUAAAACGCCGCAGACACAUAU | 6 |
| AM02375-AS | dTsAfuGfaUfaAfaAfcgCfCfgCfaGfaCfacAfsUfAu | 253 | TAUGAUAAAACGCCGCAGACACAUAU | 6 |
| AM02376-AS | dTsAfsuGfaUfaAfaAfcgCfcgCfaGfaCfacsAfsUfAu | 254 | TAUGAUAAAACGCCGCAGACACAUAU | 6 |
| AM02377-AS | dTsAfuGfaUfaAfaAfcgCfcgCfaGfaCfacAfsUfAu | 255 | TAUGAUAAAACGCCGCAGACACAUAU | 6 |
| AM02382-AS | dTsAfsgAfuGfaUfuAfggCfAfgAfgGfuUfgasAfsUfAu | 256 | TAGAUGAUUAGGCAGAGGUUGAAUAU | 7 |
| AM02383-AS | dTsAfgAfuGfaUfuAfggCfAfgAfgGfuUfgaAfsUfAu | 257 | TAGAUGAUUAGGCAGAGGUUGAAUAU | 7 |
| AM02384-AS | dTsAfsgAfuGfaUfuAfggCfagAfgGfuUfgasAfsUfAu | 258 | TAGAUGAUUAGGCAGAGGUUGAAUAU | 7 |
| AM02385-AS | dTsAfgAfuGfaUfuAfggCfagAfgGfuUfgaAfsUfAu | 259 | TAGAUGAUUAGGCAGAGGUUGAAUAU | 7 |
| AM02391-AS | dTsAfscCfaAfuUfuAfugcCfuAfcAfgdTsdT | 260 | TACCAAUUUAUGCCUACAGTT | 1 |
| AM02392-AS | dTsAfsuGfaUfaAfaAfcgcCfgCfaGfadTsdT | 261 | TAUGAUAAAACGCCGCAGATT | 2 |
| AM02393-AS | dTsAfsgAfuGfaUfuAfggcAfgAfgGfudTsdT | 262 | TAGAUGAUUAGGCAGAGGUTT | 3 |
| AM02484-AS | pdTAfuGfaUfaAfaAfcgcCfgCfaGfadTsdT | 263 | TAUGAUAAAACGCCGCAGATT | 2 |
| AM02485-AS | pdTAfuGfaUfaAfaAfcGfcCfgCfaGfadTsdT | 264 | TAUGAUAAAACGCCGCAGATT | 2 |
| AM02575-AS | pdTAfcCfaAfuUfuAfugcCfuAfcAfgdTsdT | 265 | TACCAAUUUAUGCCUACAGTT | 1 |
| AM02577-AS | pdTAfgAfuGfaUfuAfggcAfgAfgGfudTsdT | 266 | TAGAUGAUUAGGCAGAGGUTT | 3 |
| AM02609-AS | aUfaAfaAfcgcCfgCfaGfadTsdT | 379 | AUAAAACGCCGCAGATT | 81 |
| AM02889-AS | usGfaUfaAfaAfcGfccGfCfaGfaCfaCfaUfcuAu | 267 | UGAUAAAACGCCGCAGACACAUCUAU | 8 |
| AM02892-AS | usGfaAfcAfaAfuGfgcAfCfuAfgUfaAfaCfuuAu | 268 | UGAACAAAUGGCACUAGUAAACUUAU | 9 |
| AM02895-AS | usGfcGfuCfaGfcAfaaCfAfcUfuGfgCfaCfauAu | 269 | UGCGUCAGCAAACACUUGGCACAUAU | 10 |
| AM02898-AS | usGfaAfcCfaCfuGfaaCfAfaAfuGfgCfaCfuuAu | 270 | UGAACCACUGAACAAAUGGCACUUAU | 11 |
| AM02901-AS | usAfaCfgGfgCfaAfcaUfAfcCfuUfgAfuAfauAu | 271 | UAACGGGCAACAUACCUUGAUAAUAU | 12 |
| AM02904-AS | usAfcUfaGfuAfaAfcuGfAfgCfcAfgGfaGfauAu | 272 | UACUAGUAAACUGAGCCAGGAGAUAU | 13 |
| AM02907-AS | usGfgAfcAfaAfcGfggCfAfaCfaUfaCfcUfuuAu | 273 | UGGACAAACGGGCAACAUACCUUUAU | 14 |
| AM02910-AS | usAfcGfgGfcAfaCfauAfCfcUfuGfaUfaAfuuAu | 274 | UACGGGCAACAUACCUUGAUAAUUAU | 15 |
| AM02913-AS | usGfaAfgCfgAfaGfugCfAfcAfcGfgAfcCfguAu | 275 | UGAAGCGAAGUGCACACGGACCGUAU | 16 |
| AM02916-AS | usGfaUfaAfaAfcGfcCfgCfAfgaCfaCfaUfcuAu | 276 | UGAUAAAACGCCGCAGACACAUCUAU | 8 |
| AM02919-AS | usGfaAfcAfaAfuGfgCfaCfUfagUfaAfaCfuuAu | 277 | UGAACAAAUGGCACUAGUAAACUUAU | 9 |
| AM02922-AS | usGfcGfuCfaGfcAfaAfcAfCfuuGfgCfaCfauAu | 278 | UGCGUCAGCAAACACUUGGCACAUAU | 10 |
| AM02925-AS | usGfaAfcCfaCfuGfaAfcAfAfauGfgCfaCfuuAu | 279 | UGAACCACUGAACAAAUGGCACUUAU | 11 |
| AM02928-AS | usAfaCfgGfgCfaAfcAfuAfCfcuUfgAfuAfauAu | 280 | UAACGGGCAACAUACCUUGAUAAUAU | 12 |
| AM02931-AS | usAfcUfaGfuAfaAfcUfgAfGfccAfgGfaGfauAu | 281 | UACUAGUAAACUGAGCCAGGAGAUAU | 13 |
| AM02934-AS | usGfgAfcAfaAfcGfgGfcAfAfcaUfaCfcUfuuAu | 282 | UGGACAAACGGGCAACAUACCUUUAU | 14 |
| AM02937-AS | usAfcGfgGfcAfaCfaUfaCfCfuuGfaUfaAfuuAu | 283 | UACGGGCAACAUACCUUGAUAAUUAU | 15 |
| AM02940-AS | usGfaAfgCfgAfaGfuGfcAfCfacGfgAfcCfguAu | 284 | UGAAGCGAAGUGCACACGGACCGUAU | 16 |
| AM02975-AS | usAfcCfaAfuUfuAfugCfCfuAfcAfgGfcCfuuAu | 285 | UACCAAUUUAUGCCUACAGGCCUUAU | 17 |
| AM02976-AS | usAfcCfaAfuUfuAfuGfcCfUfacAfgGfcCfuuAu | 286 | UACCAAUUUAUGCCUACAGGCCUUAU | 17 |
| AM02982-AS | usAfuGfaUfaAfaAfcgCfCfgCfaGfaCfaCfauAu | 287 | UAUGAUAAAACGCCGCAGACACAUAU | 18 |
| AM02983-AS | usAfuGfaUfaAfaAfcGfcCfGfcaGfaCfaCfauAu | 288 | UAUGAUAAAACGCCGCAGACACAUAU | 18 |
| AM02984-AS | usAfgAfuGfaUfuAfggCfAfgAfgGfuUfgAfauAu | 289 | UAGAUGAUUAGGCAGAGGUUGAAUAU | 19 |
| AM02985-AS | usAfgAfuGfaUfuAfgGfcAfGfagGfuUfgAfauAu | 290 | UAGAUGAUUAGGCAGAGGUUGAAUAU | 19 |
| AM03097-AS | dTGfaUfaAfaAfcGfcCfgCfaGfaCfadTsdT | 291 | TGAUAAAACGCCGCAGACATT | 20 |
| AM03098-AS | dTGfaAfcAfaAfuGfgCfaCfuAfgUfadTsdT | 292 | TGAACAAAUGGCACUAGUATT | 21 |
| AM03099-AS | dTGfcGfuCfaGfcAfaAfcAfcUfuGfgdTsdT | 293 | TGCGUCAGCAAACACUUGGTT | 22 |
| AM03100-AS | dTGfaAfcCfaCfuGfaAfcAfaAfuGfgdTsdT | 294 | TGAACCACUGAACAAAUGGTT | 23 |
| AM03101-AS | dTAfaCfgGfgCfaAfcAfuAfcCfuUfgdTsdT | 295 | TAACGGGCAACAUACCUUGTT | 24 |
| AM03102-AS | dTAfcUfaGfuAfaAfcUfgAfgCfcAfgdTsdT | 296 | TACUAGUAAACUGAGCCAGTT | 25 |
| AM03103-AS | dTGfgAfcAfaAfcGfgGfcAfaCfaUfadTsdT | 297 | TGGACAAACGGGCAACAUATT | 26 |
| AM03104-AS | dTAfcGfgGfcAfaCfaUfaCfcUfuGfadTsdT | 298 | TACGGGCAACAUACCUUGATT | 27 |
| AM03105-AS | dTGfaAfgCfgAfaGfuGfcAfcAfcGfgdTsdT | 299 | TGAAGCGAAGUGCACACGGTT | 28 |
| AM03106-AS | dTUfcCfgCfgGfgAfuUfcAfgCfgCfcdTsdT | 300 | TUCCGCGGGAUUCAGCGCCTT | 29 |
| AM03495-AS | usGfsaAfcAfaAfuGfgCfaCfuAfgUfaAfacsusuAu | 301 | UGAACAAAUGGCACUAGUAAACUUAU | 9 |
| AM03500-AS | usGfgAfcAfaAfcGfgGfcAfaCfaUfaCfcususuAu | 302 | UGGACAAACGGGCAACAUACCUUUAU | 14 |
| AM03504-AS | usGfsaAfgCfgAfaGfuGfcAfcAfcGfgAfccsgsuAu | 303 | UGAAGCGAAGUGCACACGGACCGUAU | 16 |
| AM03508-AS | usAfscCfaAfuUfuAfuGfcCfuAfcAfgGfccsusuAu | 304 | UACCAAUUUAUGCCUACAGGCCUUAU | 17 |
| AM03512-AS | usAfsgAfuGfaUfuAfgGfcAfgAfgGfuUfgasasuAu | 305 | UAGAUGAUUAGGCAGAGGUUGAAUAU | 19 |
| AM03764-AS | usGfsaacaaAfuGfgcaCfuaguaaacsusuAu | 306 | UGAACAAAUGGCACUAGUAAACUUAU | 9 |
| AM03766-AS | usGfgacaaAfcGfggcAfacauaccususuAu | 307 | UGGACAAACGGGCAACAUACCUUUAU | 14 |
| AM03768-AS | usGfsaagcgAfaGfugcAfcacggaccsgsuAu | 308 | UGAAGCGAAGUGCACACGGACCGUAU | 16 |
| AM03770-AS | usAfsccaauUfuAfugcCfuacaggccsusuAu | 309 | UACCAAUUUAUGCCUACAGGCCUUAU | 17 |
| AM03772-AS | usAfsgaugaUfuAfggcAfgagguugasasuAu | 310 | UAGAUGAUUAGGCAGAGGUUGAAUAU | 19 |
| AM03864-AS | usGfsgAfcAfaAfcGfgGfcAfaCfaUfaCfcususuAu | 311 | UGGACAAACGGGCAACAUACCUUUAU | 14 |
| AM03865-AS | usGfsgacaaAfcGfggcAfacauaccususuAu | 312 | UGGACAAACGGGCAACAUACCUUUAU | 14 |
| AM03912-AS | usAfsuGfaUfaAfaAfcGfcCfgCfaGfaCfascsauAu | 313 | UAUGAUAAAACGCCGCAGACACAUAU | 18 |
| AM03913-AS | usAfsugauaAfaAfcgcCfgcagacascsauAu | 314 | UAUGAUAAAACGCCGCAGACACAUAU | 18 |
| AM03916-AS | usGfsaUfaAfaAfcGfcCfgCfaGfaCfaCfasuscuAu | 315 | UGAUAAAACGCCGCAGACACAUCUAU | 8 |
| AM03917-AS | usGfsauaaaAfcGfccgCfagacacasuscuAu | 316 | UGAUAAAACGCCGCAGACACAUCUAU | 8 |
| AM04041-AS | vpusGfsgAfcAfaAfcGfgGfcAfaCfaUfaCfcususuAu | 317 | UGGACAAACGGGCAACAUACCUUUAU | 14 |
| AM04042-AS | vpusAfscCfaAfuUfuAfuGfcCfuAfcAfgGfccsusuAu | 318 | UACCAAUU UAUGCCUACAGGCCUUAU | 17 |
| AM04249-AS | dTAfcCfaAfuUfuAfuGfcCfuAfcAfgdTsdTp | 319 | TACCAAUUUAUGCCUACAGTT | 1 |
| AM04272-AS | asGfsuCfcGfcGfgGfaUfuCfaGfcGfcCfgAfscsuau | 320 | AGUCCGCGGGAUUCAGCGCCGACUAU | 30 |
| AM04273-AS | usUfsaAfaGfaGfaGfgUfgCfgCfcCfgGfuGfsgsuau | 321 | UUAAAGAGAGGUGCGCCCGGUGGUAU | 31 |
| AM04274-AS | usAfsaGfcGfaAfgUfgCfaCfaCfgGfuCfcGfsgsuau | 322 | UAAGCGAAGUGCACACGGUCCGGUAU | 32 |
| AM04275-AS | usUfsgAfaGfcGfaAfgUfgCfaCfaCfgGfaCfscsuau | 323 | UUGAAGCGAAGUGCACACGGACCUAU | 33 |
| AM04276-AS | asGfsuGfaAfgCfgAfaGfuGfcAfcAfcGfgAfscsuau | 324 | AGUGAAGCGAAGUGCACACGGACUAU | 34 |
| AM04277-AS | usAfsgAfgGfuGfaAfgCfgAfaGfuGfcAfcAfscsuau | 325 | UAGAGGUGAAGCGAAGUGCACACUAU | 35 |
| AM04278-AS | usCfsaGfaGfgUfgAfaGfcGfaAfgUfgCfaCfsasuau | 326 | UCAGAGGUGAAGCGAAGUGCACAUAU | 36 |
| AM04279-AS | usGfscAfgAfgGfuGfaAfgCfgAfaGfuGfcAfscsuau | 327 | UGCAGAGGUGAAGCGAAGUGCACUAU | 37 |
| AM04280-AS | usCfsgGfuCfgUfuGfaCfaUfuGfcUfgGfgAfsgsuau | 328 | UCGGUCGUUGACAUUGCUGGGAGUAU | 38 |
| AM04281-AS | usCfsaAfgGfuCfgGfuCfgUfuGfaCfaUfuGfscsuau | 329 | UCAAGGUCGGUCGUUGACAUUGCUAU | 39 |
| AM04288-AS | usGfsaCfcUfuUfaAfcCfuAfaUfcUfcCfuCfscsuau | 330 | UGACCUUUAACCUAAUCUCCUCCUAU | 40 |
| AM04289-AS | asUfsuUfaUfgCfcUfaCfaGfcCfuCfcUfaAfsusuau | 331 | AUUUAUGCCUACAGCCUCCUAAUUAU | 41 |
| AM04290-AS | asAfsuUfuAfuGfcCfuAfcAfgCfcUfcCfuAfsasuau | 332 | AAUUUAUGCCUACAGCCUCCUAAUAU | 42 |
| AM04291-AS | usAfsaUfuUfaUfgCfcUfaCfaGfcCfuCfcUfsasuau | 333 | UAAUUUAUGCCUACAGCCUCCUAUAU | 43 |
| AM04292-AS | usCfsaAfuUfuAfuGfcCfuAfcAfgCfcUfcCfsusuau | 334 | UCAAUUUAUGCCUACAGCCUCCUUAU | 44 |
| AM04293-AS | usCfscAfaUfuUfaUfgCfcUfaCfaGfcCfuCfscsuau | 335 | UCCAAUUUAUGCCUACAGCCUCCUAU | 45 |
| AM04323-AS | usAfscGfcCfgCfaGfaCfaCfaUfcCfaGfcGfsasuau | 336 | UACGCCGCAGACACAUCCAGCGAUAU | 46 |
| AM04324-AS | usAfsaAfaCfgCfcGfcAfgAfcAfcAfuCfcAfsgsuau | 337 | UAAAACGCCGCAGACACAUCCAGUAU | 47 |
| AM04325-AS | usUfsaAfaAfcGfcCfgCfaGfaCfaCfaUfcCfsasuau | 338 | UUAAAACGCCGCAGACACAUCCAUAU | 48 |
| AM04326-AS | usUfsgAfuAfaAfaCfgCfcGfcAfgAfcAfcAfsusuau | 339 | UUGAUAAAACGCCGCAGACACAUUAU | 49 |
| AM04327-AS | usAfscGfgGfcAfaCfaUfaCfcUfuGfaUfaAfsusuau | 340 | UACGGGCAACAUACCUUGAUAAUUAU | 15 |
| AM04328-AS | usAfsaCfgGfgCfaAfcAfuAfcCfuUfgAfuAfsasuau | 341 | UAACGGGCAACAUACCUUGAUAAUAU | 12 |
| AM04329-AS | usAfsaAfcGfgGfcAfaCfaUfaCfcUfuGfaUfsasuau | 342 | UAAACGGGCAACAUACCUUGAUAUAU | 50 |
| AM04330-AS | usCfsaAfaCfgGfgCfaAfcAfuAfcCfuUfgAfsusuau | 343 | UCAAACGGGCAACAUACCUUGAUUAU | 51 |
| AM04331-AS | usAfscAfaAfcGfgGfcAfaCfaUfaCfcUfuGfsasuau | 344 | UACAAACGGGCAACAUACCUUGAUAU | 52 |
| AM04332-AS | usAfsgGfaCfaAfaCfgGfgCfaAfcAfuAfcCfsusuau | 345 | UAGGACAAACGGGCAACAUACCUUAU | 53 |
| AM04333-AS | usAfscUfaGfuAfaAfcUfgAfgCfcAfgGfaGfsasuau | 346 | UACUAGUAAACUGAGCCAGGAGAUAU | 13 |
| AM04334-AS | usGfsgCfaCfuAfgUfaAfaCfuGfaGfcCfaAfsgsuau | 347 | UGGCACUAGUAAACUGAGCCAAGUAU | 54 |
| AM04335-AS | usUfsgGfcAfcUfaGfuAfaAfcUfgAfgCfcAfsasuau | 348 | UUGGCACUAGUAAACUGAGCCAAUAU | 55 |
| AM04336-AS | usAfsaUfgGfcAfcUfaGfuAfaAfcUfgAfgCfscsuau | 349 | UAAUGGCACUAGUAAACUGAGCCUAU | 56 |
| AM04337-AS | usAfsaAfuGfgCfaCfuAfgUfaAfaCfuGfaGfscsuau | 350 | UAAAUGGCACUAGUAAACUGAGCUAU | 57 |
| AM04338-AS | usCfsaAfaUfgGfcAfcUfaGfuAfaAfcUfgAfsgsuau | 351 | UCAAAUGGCACUAGUAAACUGAGUAU | 58 |
| AM04339-AS | usAfscAfaAfuGfgCfaCfuAfgUfaAfaCfuGfsasuau | 352 | UACAAAUGGCACUAGUAAACUGAUAU | 59 |
| AM04340-AS | usUfsgAfaCfaAfaUfgGfcAfcUfaGfuAfaAfscsuau | 353 | UUGAACAAAUGGCACUAGUAAACUAU | 60 |
| AM04341-AS | asCfsuGfaAfcAfaAfuGfgCfaCfuAfgUfaAfsasuau | 354 | ACUGAACAAAUGGCACUAGUAAAUAU | 61 |
| AM04342-AS | usAfsaCfcAfcUfgAfaCfaAfaUfgGfcAfcUfsasuau | 355 | UAACCACUGAACAAAUGGCACUAUAU | 62 |
| AM04343-AS | usGfsaAfcCfaCfuGfaAfcAfaAfuGfgCfaCfsusuau | 356 | UGAACCACUGAACAAAUGGCACUUAU | 11 |
| AM04344-AS | usCfsgAfaCfcAfcUfgAfaCfaAfaUfgGfcAfscsuau | 357 | UCGAACCACUGAACAAAUGGCACUAU | 63 |
| AM04345-AS | usCfsaGfaGfgUfgAfaAfaAfgUfuGfcAfuGfsgsuau | 358 | UCAGAGGUGAAAAAGUUGCAUGGUAU | 64 |
| AM04346-AS | usGfscAfgAfgGfuGfaAfaAfaGfuUfgCfaUfsgsuau | 359 | UGCAGAGGUGAAAAAGUUGCAUGUAU | 65 |
| AM04347-AS | usGfsaUfgAfuUfaGfgCfaGfaGfgUfgAfaAfsasuau | 360 | UGAUGAUUAGGCAGAGGUGAAAAUAU | 66 |
| AM04348-AS | usGfsaGfaUfgAfuUfaGfgCfaGfaGfgUfgAfsasuau | 361 | UGAGAUGAUUAGGCAGAGGUGAAUAU | 67 |
| AM04357-AS | usCfsaCfgAfgUfcUfaGfaCfuCfuGfuGfgUfsasuau | 362 | UCACGAGUCUAGACUCUGUGGUAUAU | 68 |
| AM04358-AS | asUfsuGfaGfaGfaAfgUfcCfaCfcAfcGfaGfsusuau | 363 | AUUGAGAGAAGUCCACCACGAGUUAU | 69 |
| AM04359-AS | asAfsuUfgAfgAfgAfaGfuCfcAfcCfaCfgAfsgsuau | 364 | AAUUGAGAGAAGUCCACCACGAGUAU | 70 |
| AM04360-AS | usUfsaGfaAfaAfuUfgAfgAfgAfaGfuCfcAfscsuau | 365 | UUAGAAAAUUGAGAGAAGUCCACUAU | 71 |
| AM04361-AS | usGfscGfuCfaGfcAfaAfcAfcUfuGfgCfaCfsasuau | 366 | UGCGUCAGCAAACACUUGGCACAUAU | 10 |
| AM04362-AS | usUfsaUfgGfaUfcGfgCfaGfaGfgAfgCfcAfscsuau | 367 | UUAUGGAUCGGCAGAGGAGCCACUAU | 72 |
| AM04363-AS | usCfsaGfuAfuGfgAfuCfgGfcAfgAfgGfaGfscsuau | 368 | UCAGUAUGGAUCGGCAGAGGAGCUAU | 73 |
| AM04364-AS | usGfsgAfgUfuCfcGfcAfgUfaUfgGfaUfcGfsgsuau | 369 | UGGAGUUCCGCAGUAUGGAUCGGUAU | 74 |
| AM04441-AS | usAfscCfaAfuUfuAfuGfcCfuAfcAfgGfcscsu | 370 | UACCAAUUUAUGCCUACAGGCCU | 75 |
| AM04442-AS | usAfscsCfaAfuUfuAfuGfcCfuAfcAfgGfccsu | 371 | UACCAAUUUAUGCCUACAGGCCU | 75 |
| AM04443-AS | usAfscsCfaAfuUfuAfuGfcCfuAfcAfgGfsc | 372 | UACCAAUUUAUGCCUACAGGC | 76 |
| AM04446-AS | usGfsaAfgCfgAfaGfuGfcAfcAfcGfgAfcscsg | 373 | UGAAGCGAAGUGCACACGGACCG | 77 |
| AM04447-AS | usGfsasAfgCfgAfaGfuGfcAfcAfcGfgAfccsg | 374 | UGAAGCGAAGUGCACACGGACCG | 77 |
| AM04448-AS | usGfsasAfgCfgAfaGfuGfcAfcAfcGfgAfsc | 375 | UGAAGCGAAGUGCACACGGAC | 78 |
| AM04459-AS | usGfsgAfcAfaAfcGfgGfcAfaCfaUfaCfcsusu | 376 | UGGACAAACGGGCAACAUACCUU | 79 |
| AM04460-AS | usGfsgsAfcAfaAfcGfgGfcAfaCfaUfaCfcusu | 377 | UGGACAAACGGGCAACAUACCUU | 79 |
| AM04461-AS | usGfsgsAfcAfaAfcGfgGfcAfaCfaUfaCfsc | 378 | UGGACAAACGGGCAACAUACC | 80 |
| AM04661-AS | usGfsugaAfgCfGfaaguGfcAfcacsusu | 380 | UGUGAAGCGAAGUGCACACUU | 82 |
| AM04662-AS | usAfsaaaUfuGfAfgagaAfgUfccaccsasc | 381 | UAAAAUUGAGAGAAGUCCACCAC | 83 |
| AM04746-AS | usUfsgAfaGfcGfaAfgUfgCfaCfaCfgGfascscgcg | 382 | UUGAAGCGAAGUGCACACGGACCGCG | 84 |
| AM04747-AS | vpusUfsgAfaGfcGfaAfgUfgCfaCfaCfgGfascscgcg | 383 | UUGAAGCGAAGUGCACACGGACCGCG | 84 |
| AM04749-AS | usGfsuGfaAfgCfgAfaGfuGfcAfcAfcGfgsasccgc | 384 | UGUGAAGCGAAGUGCACACGGACCGC | 85 |
| AM04750-AS | vpusGfsuGfaAfgCfgAfaGfuGfcAfcAfcGfgsasccgc | 385 | UGUGAAGCGAAGUGCACACGGACCGC | 85 |
| AM04752-AS | usGfsaUfaAfaAfcGfcCfgCfaGfaCfaCfasusccgc | 386 | UGAUAAAACGCCGCAGACACAUCCGC | 86 |
| AM04753-AS | vpusGfsaUfaAfaAfcGfcCfgCfaGfaCfaCfasusccgc | 387 | UGAUAAAACGCCGCAGACACAUCCGC | 86 |
| AM04755-AS | usAfsuGfaUfaAfaAfcGfcCfgCfaGfaCfascsacgc | 388 | UAUGAUAAAACGCCGCAGACACACGC | 87 |
| AM04756-AS | vpusAfsuGfaUfaAfaAfcGfcCfgCfaGfaCfascsacgc | 389 | UAUGAUAAAACGCCGCAGACACACGC | 87 |
| AM04758-AS | asGfsuGfaAfgCfgAfaGfuGfcAfcAfcGfgsasccgc | 390 | AGUGAAGCGAAGUGCACACGGACCGC | 88 |
| AM04760-AS | asAfsuGfaUfaAfaAfcGfcCfgCfaGfaCfascsacgc | 391 | AAUGAUAAAACGCCGCAGACACACGC | 89 |
| AM04762-AS | usGfsaAfgCfgAfaGfuGfcAfcAfcGfgAfcscsgcgc | 392 | UGAAGCGAAGUGCACACGGACCGCGC | 90 |
| AM04763-AS | vpusGfsaAfgCfgAfaGfuGfcAfcAfcGfgAfcscsgcgc | 393 | UGAAGCGAAGUGCACACGGACCGCGC | 90 |
| AM04765-AS | usGfsgAfcAfaAfcGfgGfcAfaCfaUfaCfcsusucgc | 394 | UGGACAAACGGGCAACAUACCUUCGC | 91 |
| AM04766-AS | vpusGfsgAfcAfaAfcGfgGfcAfaCfaUfaCfcsusucgc | 395 | UGGACAAACGGGCAACAUACCUUCGC | 91 |
| AM04768-AS | usAfscCfaAfuUfuAfuGfcCfuAfcAfgCfcsusccgc | 396 | UACCAAUUUAUGCCUACAGCCUCCGC | 92 |
| AM04769-AS | vpusAfscCfaAfuUfuAfuGfcCfuAfcAfgCfcsusccgc | 397 | UACCAAUUUAUGCCUACAGCCUCCGC | 92 |
| AM04782-AS | aAfuUfuAfuGfcCfuAfcAfgdTsdT | 398 | AAUUUAUGCCUACAGTT | 94 |
| AM04784-AS | uGfaUfuAfgGfcAfgAfgGfudTsdT | 399 | UGAUUAGGCAGAGGUTT | 93 |
| AM04789-AS | aAfuUfuAfugcCfuAfcAfgdTsdT | 400 | AAUUUAUGCCUACAGTT | 94 |
| AM05011-AS | usAfscsCfaAfuUfuAfuGfcCfuAfcAfgusu | 401 | UACCAAUUUAUGCCUACAGUU | 95 |
| AM05012-AS | usAfscsCfaAfuUfuAfuGfcCfuAfcAfggsc | 402 | UACCAAUUUAUGCCUACAGGC | 76 |
| AM05013-AS | vpusAfscsCfaAfuUfuAfuGfcCfuAfcAfgGfsc | 403 | UACCAAUUUAUGCCUACAGGC | 76 |
| AM05014-AS | vpusAfscsCfaAfuUfuAfuGfcCfuAfcAfgusu | 404 | UACCAAUUUAUGCCUACAGUU | 95 |
| AM05052-AS | asUfsusGfaGfaGfaAfgUfcCfaCfcAfcGfsa | 405 | AUUGAGAGAAGUCCACCACGA | 96 |
| AM05053-AS | asUfsusGfaGfaGfaAfgUfcCfaCfcAfcgsa | 406 | AUUGAGAGAAGUCCACCACGA | 96 |
| AM05054-AS | asUfsusGfaGfaGfaAfgUfcCfaCfcAfcusu | 407 | AUUGAGAGAAGUCCACCACUU | 97 |
| AM05055-AS | vpusUfsusGfaGfaGfaAfgUfcCfaCfcAfcGfsa | 408 | UUUGAGAGAAGUCCACCACGA | 98 |
| AM05056-AS | asAfsusUfgAfgAfgAfaGfuCfcAfcCfaCfsg | 409 | AAUUGAGAGAAGUCCACCACG | 99 |
| AM05057-AS | asAfsusUfgAfgAfgAfaGfuCfcAfcCfacsg | 410 | AAUUGAGAGAAGUCCACCACG | 99 |
| AM05058-AS | asAfsusUfgAfgAfgAfaGfuCfcAfcCfausu | 411 | AAUUGAGAGAAGUCCACCAUU | 100 |
| AM05060-AS | vpusAfsusUfgAfgAfgAfaGfuCfcAfcCfaCfsg | 412 | UAUUGAGAGAAGUCCACCACG | 101 |
| AM05061-AS | usUfsasGfaAfaAfuUfgAfgAfgAfaGfuCfsc | 413 | UUAGAAAAUUGAGAGAAGUCC | 102 |
| AM05062-AS | vpusUfsasGfaAfaAfuUfgAfgAfgAfaGfuCfsc | 414 | UUAGAAAAUUGAGAGAAGUCC | 102 |

TABLE 1B
HBV RNAi trigger sense strand sequences.

| | | SEQ | | SEQ |
|---|---|---|---|---|
| | | ID | Unmodified sequence | ID |
| Strand ID | Modified sequence (5′ → 3′) | NO. | (5′ → 3′) | NO. |
| AM00005-SS | (Chol-ALNY)uAuCfuGfuAfgGfcAfuAfaAfuUfgGfuAf(invdT) | 415 | UAUCUGUAGGCAUAAAUUGGUAT | 103 |
| AM00007-SS | (Chol-ALNY)uAuUfcUfgCfgGfcGfuUfuUfaUfcAfuAf(invdT) | 416 | UAUUCUGCGGCGUUUUAUCAUAT | 104 |
| AM00009-SS | (Chol-ALNY)uAuAfcCfuCfuGfcCfuAfaUfcAfuCfuAf(invdT) | 417 | UAUACCUCUGCCUAAUCAUCUAT | 105 |
| AM00013-SS | (Toc)uAuAfcCfuCfuGfcCfuAfaUfcAfuCfuAf(invdT) | 418 | UAUACCUCUGCCUAAUCAUCUAT | 105 |
| AM00014-SS | (Chol-TEG)uAuAfcCfuCfuGfcCfuAfaUfcAfuCfuAf(invdT) | 419 | UAUACCUCUGCCUAAUCAUCUAT | 105 |
| AM00015-SS | (Chol-C6)uAuCfuGfuAfgGfcAluAfaAfuUfgGfuAf(invdT) | 420 | UAUCUGUAGGCAUAAAUUGGUAT | 103 |
| AM00016-SS | (Chol-C6)uAuAfcCfuCfuGfcCfuAfaUfcAfuCfuAf(invdT) | 421 | UAUACCUCUGCCUAAUCAUCUAT | 105 |
| AM00029-SS | (NH2-C6)CfuGfuAfgGfcAfuAfaAfuUfgGfuAf(invdT) | 422 | CUGUAGGCAUAAAUUGGUAT | 106 |
| AM00039-SS | (NH2-C6)AfcCfuCfuGfcCfuAfaUfcAfuCfuAf(invdT) | 423 | ACCUCUGCCUAAUCAUCUAT | 107 |
| AM00138-SS | (NH2-C6)UfuUfaCfuAfgUfgCfcAfuUfuGfuAf(invdT) | 424 | UUUACUAGUGCCAUUUGUAT | 108 |
| AM00175-SS | (NH2-C6)uAuCfuGfuagGfcAfuAfaAfuUfgGfuAf(invdT) | 425 | UAUCUGUAGGCAUAAAUUGGUAT | 103 |
| AM00176-SS | (NH2-C6)uAuAfcCfucuGfcCfuAfaUfcAfuCfuAf(invdT) | 426 | UAUACCUCUGCCUAAUCAUCUAT | 105 |
| AM00177-SS | (NH2-C6)uAuCfuGfuAfgGfcAfuAfaAfuUfgGfuAf(invdT) | 427 | UAUCUGUAGGCAUAAAUUGGUAT | 103 |
| AM00178-SS | (NH2-C6)uAuAfcCfuCfuGfcCfuAfaUfcAfuCfuAf(invdT) | 428 | UAUACCUCUGCCUAAUCAUCUAT | 105 |
| AM00179-SS | (NH2-C6)CfuGfuagGfcAfuAfaAfuUfgGfuAf(invdT) | 429 | CUGUAGGCAUAAAUUGGUAT | 106 |
| AM00180-SS | (NH2-C6)AfcCfucuGfcCfuAfaUfcAfuCfuAf(invdT) | 430 | ACCUCUGCCUAAUCAUCUAT | 107 |
| AM00429-SS | (NH2-C6)AfcCfuCfugcCfuAfaUfcAfuCfuAf(invdT) | 431 | ACCUCUGCCUAAUCAUCUAT | 107 |
| AM00430-SS | (NH2-C6)AfcCfuCfuGfccuAfaUfcAfuCfuAf(invdT) | 432 | ACCUCUGCCUAAUCAUCUAT | 107 |
| AM00431-SS | (NH2-C6)AfcCfuCfuGfcCfuaaUfcAfuCfuAffinvdT) | 433 | ACCUCUGCCUAAUCAUCUAT | 107 |
| AM00432-SS | (NH2-C6)AfcCfuCfuGfcCfuAfaucAfuCfuAf(invdT) | 434 | ACCUCUGCCUAAUCAUCUAT | 107 |
| AM00433-SS | (NH2-C6)AfcCfuCfUfGfcCfuAfaUfcAfuCfuAf(invdT) | 435 | ACCUCUGCCUAAUCAUCUAT | 107 |
| AM00434-SS | (NH2-C6)AfcCfuCfuGfCfCfuAfaUfcAfuCfuAf(invdT) | 436 | ACCUCUGCCUAAUCAUCUAT | 107 |
| AM00435-SS | (NH2-C6)AfcCfuCfuGfcCfUfAfaUfcAfuCfuAf(invdT) | 437 | ACCUCUGCCUAAUCAUCUAT | 107 |
| AM00436-SS | (NH2-C6)AfcCfuCfuGfcCfuAfAfUfcAfuCfuAf(invdT) | 438 | ACCUCUGCCUAAUCAUCUAT | 107 |
| AM00437-SS | (NH2-C6)AfcCfuCfuGfcCfuAfaUfCfAfuCfuAf(invdT) | 439 | ACCUCUGCCUAAUCAUCUAT | 107 |
| AM00440-SS | (NH2-C6)CUNAuGfuAfgGfcAfuAfaAfuUfgGfuAf(invdT) | 440 | CUGUAGGCAUAAAUUGGUAT | 106 |
| AM00441-SS | (NH2-C6)CfUUNAGfuAfgGfcAfuAfaAfuUfgGfuAf(invdT) | 441 | CUGUAGGCAUAAAUUGGUAT | 106 |
| AM00442-SS | (NH2-C6)AUNAcCfuCfuGfcCfuAfaUfcAfuCfuAf(invdT) | 442 | ACCUCUGCCUAAUCAUCUAT | 107 |
| AM00443-SS | (NH2-C6)AfCUNACfuCfuGfcCfuAfaUfcAfuCfuAf(invdT) | 443 | ACCUCUGCCUAAUCAUCUAT | 107 |
| AM00620-SS | CfuGfuAfgGfcAfuAfaAfuUfgGfuAf(invdT) | 444 | CUGUAGGCAUAAAUUGGUAT | 106 |
| AM00621-SS | AfcCfuCfuGfcCfuAfaUfcAfuCfuAf(invdT) | 445 | ACCUCUGCCUAAUCAUCUAT | 107 |
| AM01885-SS | (Chol-C6)uAuCfuGfuAfgGfcAfuAfaAfuUfgGfuAf(invdT) | 446 | UAUCUGUAGGCAUAAAUUGGUAT | 103 |
| | (TEG-Biotin) | | | |
| AM01886-SS | (Chol-C6)uAuAfcCfuCfuGfcCfuAfaUfcAfuCfuAf(invdT) | 447 | UAUACCUCUGCCUAAUCAUCUAT | 105 |
| | (TEG-Biotin) | | | |
| AM01934-SS | (NH2-C6)CfuGfuAfgGfCfAfuAfaAfuUfgGfuAf(invdT) | 448 | CUGUAGGCAUAAAUUGGUAT | 106 |
| AM01936-SS | (NH2-C6)CfuGfuAfgGfCfAfuAfaAfuUfgGfsusAf(invdT) | 449 | CUGUAGGCAUAAAUUGGUAT | 106 |
| AM01939-SS | (NH2-C6)AfcCfuCfuGfCfCfuAfaUfcAfuCfsusAf(invdT) | 450 | ACCUCUGCCUAAUCAUCUAT | 107 |
| AM01940-SS | (NH2-C6)UfuUfaCfuAfGfUfgCfcAfuUfuGfuAf(invdT) | 451 | UUUACUAGUGCCAUUUGUAT | 108 |
| AM01941-SS | (NH2-C6)UfuUfaCfuAfGfUfgCfcAfuUfuGfsusAf(invdT) | 452 | UUUACUAGUGCCAUUUGUAT | 108 |
| AM01963-SS | (Alk-SS-C6)CfuGfuAfgGfcAfuAfaAfuUfgGfuAf(invdT) | 453 | CUGUAGGCAUAAAUUGGUAT | 106 |
| AM01964-SS | (Alk-SS-C6)AfcCfuCfuGfcCfuAfaUfcAfuCfuAf(invdT) | 454 | ACCUCUGCCUAAUCAUCUAT | 107 |
| AM01965-SS | (Alk-SS-C6)UfuUfaCfuAfgUfgCfcAfuUfuGfuAf(invdT) | 455 | UUUACUAGUGCCAUUUGUAT | 108 |
| AM01979-SS | (NH2-C6)UfcUfgCfgGfcGfuUfuUfaUfcAfuAf(invdT) | 456 | UCUGCGGCGUUUUAUCAUAT | 109 |
| AM01984-SS | (Alk-SS-C6)UfcUfgCfgGfcGfuUfuUfaUfcAfuAf(invdT) | 457 | UCUGCGGCGUUUUAUCAUAT | 109 |
| AM01991-SS | (NH2-C6)UfcUfgCfgGfCfGfuUfuUfaUfcAfuAf(invdT) | 458 | UCUGCGGCGUUUUAUCAUAT | 109 |
| AM01992-SS | (NH2-C6)UfcUfgCfgGfCfGfuUfuUfaUfcAfsusAf(invdT) | 459 | UCUGCGGCGUUUUAUCAUAT | 109 |
| AM02080-SS | (Alk-SS-C6)AfcCfuCfuGfCfCfuAfaUfcAfuCfuAf(invdT) | 460 | ACCUCUGCCUAAUCAUCUAT | 107 |
| AM02081-SS | (Alk-SS-C6)AfcCfuCfuGfCfCfuAfaUfcAfuCfsusAf(invdT) | 461 | ACCUCUGCCUAAUCAUCUAT | 107 |
| AM02082-SS | (Alk-SS-C6)CfuGfuAfgGfCfAfuAfaAfuUfgGfuAf(invdT) | 462 | CUGUAGGCAUAAAUUGGUAT | 106 |
| AM02083-SS | (Alk-SS-C6)CfuGfuAfgGfCfAfuAfaAfuUfgGfsusAf(invdT) | 463 | CUGUAGGCAUAAAUUGGUAT | 106 |
| AM02187-SS | (Alk-SS-C6)UfuUfaCfuAfGfUfgCfcAfuUfuGfsusAf(invdT) | 464 | UUUACUAGUGCCAUUUCGUAT | 108 |
| AM02189-SS | (Alk-SS-C6)UfcUfgCfgGfCfGfuUfuUfaUfcAfsusAf(invdT) | 465 | UCUGCGGCGUUUUAUCAUAT | 109 |
| AM02278-SS | (Alk-SS-C6)CfuGfuAfgGfcAfuAfaAfuUfgGfsusAf(invdT) | 466 | CUGUAGGCAUAAAUUGGUAT | 106 |
| AM02283-SS | (Alk-SS-C6)AfcCfuCfuGfcCfuAfaUfcAfuCfsusAf(invdT) | 467 | ACCUCUGCCUAAUCAUCUAT | 107 |
| AM02285-SS | (Alk-SS-C6)UfuUfaCfuAfgUfgCfcAfuUfuGfsusAf(invdT) | 468 | UUUACUAGUGCCAUUUGUAT | 108 |
| AM02291-SS | (Alk-SS-C6)UfcUfgCfgGfcGfuUfuUfaUfcAfsusAf(invdT) | 469 | UCUGCGGCGUUUUAUCAUAT | 109 |
| AM02316-SS | (Chol-TEG)uAuCfuGfuAfgGfCfAfuAfaAfuUfgGfuAf(invdT) | 470 | UAUCUGUAGGCAUAAAUUGGUAT | 103 |
| AM02317-SS | (Chol-TEG)uAuAfcCfuCfuGfCfCfuAfaUfcAfuCfuAf(invdT) | 471 | UAUACCUCUGCCUAAUCAUCUAT | 105 |
| AM02318-SS | (Chol-TEG)uAuUfuUfaCfuAfGfUfgCfcAfuUfuGfuAf(invdT) | 472 | UAUUUUACUAGUGCCAUUUGUAT | 110 |
| AM02319-SS | (Chol-TEG)uAuUfcUfgCfgGfCfGfuUfuUfaUfcAfuAf(invdT) | 473 | UAUUCUGCGGCGUUUUAUCAUAT | 104 |
| AM02320-SS | (Chol-C6)uAuCfuGfuAfgGfCfAfuAfaAfuUfgGfuAf(invdT) | 474 | UAUCUGUAGGCAUAAAUUGGUAT | 103 |
| AM02321-SS | (Chol-C6)uAuAfcCfuCfuGfCfCfuAfaUfcAfuCfuAf(invdT) | 475 | UAUACCUCUGCCUAAUCAUCUAT | 105 |
| AM02322-SS | (Chol-C6)uAuUfuUfaCfuAfGfUfgCfcAfuUfuGfuAf(invdT) | 476 | UAUUUUACUAGUGCCAUUUGUAT | 110 |
| AM02323-SS | (Chol-C6)uAuUfcUfgCfgGfCfGfuUfuUfaUfcAfuAf(invdT) | 477 | UAUUCUGCGGCGUUUUAUCAUAT | 104 |
| AM02370-SS | (Chol-TEG)uAuAusGfscCfuGfuAfggCfAfuAfaAfuUfgGfsusAf | 478 | UAUAUGCCUGUAGGCAUAAAUUGGUA | 111 |
| AM02371-SS | (Chol-TEG)uAuAuGfcCfuGfuAfggCfAfuAfaAfuUfgGfu(invdA) | 479 | UAUAUGCCUGUAGGCAUAAAUUGGUA | 111 |
| AM02372-SS | (Chol-TEG)uAuAusGfscCfuGfuAfGfgCfAfuAfaAfuUfgGfsusAf | 480 | UAUAUGCCUGUAGGCAUAAAUUGGUA | 111 |
| AM02373-SS | (Chol-TEG)uAuAuGfcCfuGfuAfGfgCfAfuAfaAfuUfgGfu(invdA) | 481 | UAUAUGCCUGUAGGCAUAAAUUGGUA | 111 |
| AM02378-SS | (Chol-TEG)uAuAusUfsgUfcUfgCfggCfGfuUfuUfaUfcAfsusAf | 482 | UAUAUUGUCUGCGGCGUUUUAUCAUA | 112 |
| AM02379-SS | (Chol-TEG)uAuAuUfgUfcUfgCfggCfGfuUfuUfaUfcAfu(invdA) | 483 | UAUAUUGUCUGCGGCGUUUUAUCAUA | 112 |
| AM02380-SS | (Chol-TEG)uAuAusUfsgUfcUfgCfGfgCfGfuUfuUfaUfcAfsusAf | 484 | UAUAUUGUCUGCGGCGUUUUAUCAUA | 112 |
| AM02381-SS | (Chol-TEG)uAuAuUfgUfcUfgCfGfgCfGfuUfuUfaUfcAfu(invdA) | 485 | UAUAUUGUCUGCGGCGUUUUAUCAUA | 112 |
| AM02386-SS | (Chol-TEG)uAuAusCfsaAfcCfuCfugCfCfuAfaUfcAfuCfsusAf | 486 | UAUAUCAACCUCUGCCUAAUCAUCUA | 113 |
| AM02387-SS | (Chol-TEG)uAuAuCfaAfcCfuCfugCfCfuAfaUfcAfuCfu(invdA) | 487 | UAUAUCAACCUCUGCCUAAUCAUCUA | 113 |
| AM02388-SS | (Chol-TEG)uAuAusCfsaAfcCfuCfUfgCfCfuAfaUfcAfuCfsusAf | 488 | UAUAUCAACCUCUGCCUAAUCAUCUA | 113 |
| AM02389-SS | (Chol-TEG)uAuAuCfaAfcCfuCfUfgCfCfuAfaUfcAfuCfu(invdA) | 489 | UAUAUCAACCUCUGCCUAAUCAUCUA | 113 |
| AM02483-SS | UfcUfgCfgGfCfGfuUfuUfaUfcAfuAf(invdT) | 490 | UCUGCGGCGUUUUAUCAUAT | 109 |
| AM02486-SS | UfcUfgCfgGfcGfuUfuUfaUfcAfuAf(invdT) | 491 | UCUGCGGCGUUUUAUCAUAT | 109 |
| AM02489-SS | (Chol-C6)uAuUfcUfgCfgGfcGfuUfuUfaUfcAfuAf(invdT) | 492 | UAUUCUGCGGCGUUUUAUCAUAT | 104 |
| AM02576-SS | CfuGfuAfgGfCfAfuAfaAfuUfgGfuAf(invdT) | 493 | CUGUAGGCAUAAAUUGGUAT | 106 |
| AM02578-SS | AfcCfuCfuGfCfCfuAfaUfcAfuCfuAf(invdT) | 494 | ACCUCUGCCUAAUCAUCUAT | 107 |
| AM02888-SS | uAuAusUfgUfgUfcUfgcGfGfcGfuUfuUfaUfcAf(C6-SS-Alk-Me) | 495 | UAUAUUGUGUCUGCGGCGUUUUAUCA | 114 |
| AM02891-SS | uAuAusUfuUfaCfuAfguGfCfcAfuUfuGfuUfcAf(C6-SS-Alk-Me) | 496 | UAUAUUUUACUAGUGCCAUUUGUUCA | 115 |
| AM02894-SS | uAuAusUfgCfcAfaGfugUfUfuGfcUfgAfcGfcAf(C6-SS-Alk-Me) | 497 | UAUAUUGCCAAGUGUUUGCUGACGCA | 116 |
| AM02897-SS | uAuAusUfgCfcAfuUfugUfUfcAfgUfgGfuUfcAf(C6-SS-Alk-Me) | 498 | UAUAUUGCCAUUUGUUCAGUGGUUCA | 117 |
| AM02900-SS | uAuAusAfuCfaAfgGfuaUfGfuUfgCfcCfgUfuAf(C6-SS-Alk-Me) | 499 | UAUAUAUCAAGGUAUGUUGCCCGUUA | 118 |
| AM02903-SS | uAuAusUfcCfuGfgCfucAfGfuUfuAfcUfaGfuAf(C6-SS-Alk-Me) | 500 | UAUAUUCCUGGCUCAGUUUACUAGUA | 119 |
| AM02906-SS | uAuAusGfgUfaUfgUfugCfCfcGfuUfuGfuCfcAf(C6-SS-Alk-Me) | 501 | UAUAUGGUAUGUUGCCCGUUUGUCCA | 120 |
| AM02909-SS | uAuAusUfaUfcAfaGfguAfUfgUfuGfcCfcGfuAf(C6-SS-Alk-Me) | 502 | UAUAUUAUCAAGGUAUGUUGCCCGUA | 121 |
| AM02912-SS | uAuAusGfuCfcGfuGfugCfAfcUfuCfgCfuUfcAf(C6-SS-Alk-Me) | 503 | UAUAUGUCCGUGUGCACUUCGCUUCA | 122 |
| AM02915-SS | uAuAusUfgUfgUfCfugCfgGfcGfuUfuUfaUfcAf(C6-SS-Alk-Me) | 504 | UAUAUUGUGUCUGCGGCGUUUUAUCA | 114 |
| AM02918-SS | uAuAusUfuUfaCfUfagUfgCfcAfuUfuGfuUfcAf(C6-SS-Alk-Me) | 505 | UAUAUUUUACUAGUGCCAUUUGUUCA | 115 |
| AM02921-SS | uAuAusUfgCfcAfAfguGfuUfuGfcUfgAfcGfcAf(C6-SS-Alk-Me) | 506 | UAUAUUGCCAAGUGUUUGCUGACGCA | 116 |
| AM02924-SS | uAuAusUfgCfcAfUfuuGfuUfcAfgUfgGfuUfcAf(C6-SS-Alk-Me) | 507 | UAUAUUGCCAUUUGUUCAGUGGUUCA | 117 |
| AM02927-SS | uAuAusAfuCfaAfGfguAfuGfuUfgCfcCfgUfuAf(C6-SS-Alk-Me) | 508 | UAUAUAUCAAGGUAUGUUGCCCGUUA | 118 |
| AM02930-SS | uAuAusUfcCfuGfGfcuCfaGfuUfuAfcUfaGfuAf(C6-SS-Alk-Me) | 509 | UAUAUUCCUGGCUCAGUUUACUAGUA | 119 |
| AM02933-SS | uAuAusGfgUfaUfGfuuGfcCfcGfuUfuGfuCfcAf(C6-SS-Alk-Me) | 510 | UAUAUGGUAUGUUGCCCGUUUGUCCA | 120 |
| AM02936-SS | uAuAusUfaUfcAfAfggUfaUfgUfuGfcCfcGfuAf(C6-SS-Alk-Me) | 511 | UAUAUUAUCAAGGUAUGUUGCCCGUA | 121 |
| AM02939-SS | uAuAusGfuCfcGfUfguGfcAfcUfuCfgCfuUfcAf(C6-SS-Alk-Me) | 512 | UAUAUGUCCGUGUGCACUUCGCUUCA | 122 |
| AM02978-SS | uAuAusGfcCfuGfuAfggCfAfuAfaAfuUfgGfuAf(C6-SS-Alk-Me) | 513 | UAUAUGCCUGUAGGCAUAAAUUGGUA | 111 |
| AM02979-SS | uAuAusGfcCfuGfuAfggCfAfuAfaAfuUfgGfuAf(C11-PEG3-NAG3) | 514 | UAUAUGCCUGUAGGCAUAAAUUGGUA | 111 |
| AM02981-SS | uAuAusGfcCfuGfUfagGfcAfuAfaAfuUfgGfuAf(C6-SS-Alk-Me) | 515 | UAUAUGCCUGUAGGCAUAAAUUGGUA | 111 |
| AM02987-SS | uAuAusUfgUfcUfgCfggCfGfuUfuUfaUfcAfuAf(C6-SS-Alk-Me) | 516 | UAUAUUGUCUGCGGCGUUUUAUCAUA | 112 |
| AM02988-SS | uAuAusUfgUfcUfgCfggCfGfuUfuUfaUfcAfuAf(C11-PEG3-NAG3) | 517 | UAUAUUGUCUGCGGCGUUUUAUCAUA | 112 |
| AM02990-SS | uAuAusUfgUfcUfGfcgGfcGfuUfuUfaUfcAfuAf(C6-SS-Alk-Me) | 518 | UAUAUUGUCUGCGGCGUUUUAUCAUA | 112 |
| AM02992-SS | uAuAusCfaAfcCfuCfugCfCfuAfaUfcAfuauAf(C6-SS-Alk-Me) | 519 | UAUAUCAACCUCUGCCUAAUCAUCUA | 113 |
| AM02993-SS | uAuAusCfaAfcCfuCfugCfCfuAfaUfcAfuCfuAf(C11-PEG3-NAG3) | 520 | UAUAUCAACCUCUGCCUAAUCAUCUA | 113 |
| AM02995-SS | uAuAusCfaAfcCfUfcuGfcCfuAfaUfcAfuCfuAf(C6-SS-Alk-Me) | 521 | UAUAUCAACCUCUGCCUAAUCAUCUA | 113 |
| AM03087-SS | (Chol-TEG)uAuUfgUfcUfgCfgGfcGfuUfuUfaUfcAf(invdT) | 522 | UAUUGUCUGCGGCGUUUUAUCAT | 123 |
| AM03088-SS | (Chol-TEG)uAuUfaCfuAfgUfgCfcAfuUfuGfuUfcAf(invdT) | 523 | UAUUACUAGUGCCAUUUGUUCAT | 124 |
| AM03089-SS | (Chol-TEG)uAuCfcAfaGfuGfuUfuGfcUfgAfcGfcAf(invdT) | 524 | UAUCCAAGUGUUUGCUGACGCAT | 125 |
| AM03090-SS | (Chol-TEG)uAuCfcAfuUfuGfuUfcAfgUfgGfuUfcAf(invdT) | 525 | UAUCCAUUUGUUCAGUGGUUCAT | 126 |
| AM03091-SS | (Chol-TEG)uAuCfaAfgGfuAfuGfuUfgCfcCfgUfuAf(invdT) | 526 | UAUCAAGGUAUGUUGCCCGUUAT | 127 |
| AM03092-SS | (Chol-TEG)uAuCfuGfgCfuCfaGfuUfuAfcUfaGfuAf(invdT) | 527 | UAUCUGGCUCAGUUUACUAGUAT | 128 |
| AM03093-SS | (Chol-TEG)uAuUfaUfgUfuGfcCfcGfuUfuGfuCfcAf(invdT) | 528 | UAUUAUGUUGCCCGUUUGUCCAT | 129 |
| AM03094-SS | (Chol-TEG)uAuUfcAfaGfgUfaUfgUfuGfcCfcGfuAf(invdT) | 529 | UAUUCAAGGUAUGUUGCCCGUAT | 130 |
| AM03095-SS | (Chol-TEG)uAuCfcGfuGfuGfcAfcUfuCfgCfuUfcAf(invdT) | 530 | UAUCCGUGUGCACUUCGCUUCAT | 131 |
| AM03096-SS | (Chol-TEG)uAuGfgCfgCfuGfaAfuCfcCfgCfgGfaAf(invdT) | 531 | UAUGGCGCUGAAUCCCGCGGAAT | 132 |
| AM03493-SS | uAuAusUfsuUfaCfuAfgUfgCfcAfuUfuGfuUfca(NAG13) | 532 | UAUAUUUUACUAGUGCCAUUUGUUCA | 115 |
| AM03494-SS | uAuAususuuacuagUfgCfcauuuguuca(NAG13) | 533 | UAUAUUUUACUAGUGCCAUUUGUUCA | 115 |
| AM03496-SS | uAuAususuuaCfuagUfgCfcauuuguuca(NAG13) | 534 | UAUAUUUUACUAGUGCCAUUUGUUCA | 115 |
| AM03497-SS | uAuAusGfsgUfaUfgUfuGfcCfcGfuUfuGfuCfca (NAG13) | 535 | UAUAUGGUAUGUUGCCCGUUUGUCCA | 120 |
| AM03498-SS | uAuAusgsguauguuGfcCfcguuuguCfca(NAG13) | 536 | UAUAUGGUAUGUUGCCCGUUUGUCCA | 120 |
| AM03499-SS | uAuAusgsguauguuGfcCfcguuugucca(NAG13) | 537 | UAUAUGGUAUGUUGCCCGUUUGUCCA | 120 |
| AM03501-SS | uAuAusGfsuCfcGfuGfuGfcAfcUfuCfgCfuUfca(NAG13) | 538 | UAUAUGUCCGUGUGCACUUCGCUUCA | 122 |
| AM03502-SS | uAuAusgsuCfcguguGfcAfcuuCfgCfuuca(NAG13) | 539 | UAUAUGUCCGUGUGCACUUCGCUUCA | 122 |
| AM03503-SS | uAuAusgsuccguguGfcAfcuucgcuuca(NAG13) | 540 | UAUAUGUCCGUGUGCACUUCGCUUCA | 122 |
| AM03505-SS | uAuAusGfscCfuGfuAfgGfcAfuAfaAfuUfgGfua(NAG13) | 541 | UAUAUGCCUGUAGGCAUAAAUUGGUA | 111 |
| AM03506-SS | uAuAusgscCfuguagGfcAfuaaauuggua(NAG13) | 542 | UAUAUGCCUGUAGGCAUAAAUUGGUA | 111 |
| AM03507-SS | uAuAusgsccuguagGfcAfuaaauuggua(NAG13) | 543 | UAUAUGCCUGUAGGCAUAAAUUGGUA | 111 |
| AM03509-SS | uAuAusCfsaAfcCfuCfuGfcCfuAfaUfcAfuCfua(NAG13) | 544 | UAUAUCAACCUCUGCCUAAUCAUCUA | 113 |
| AM03510-SS | uAuAusCfsaacCfuCfuGfcCfuaaucauCfua(NAG13) | 545 | UAUAUCAACCUCUGCCUAAUCAUCUA | 113 |
| AM03511-SS | uAuAuscsaaccucuGfcCfuaaucaucua(NAG13) | 546 | UAUAUCAACCUCUGCCUAAUCAUCUA | 113 |
| AM03763-SS | uAuAususuuacuagUfGfCfcauuuguuca(NAG13) | 547 | UAUAUUUUACUAGUGCCAUUUGUUCA | 115 |
| AM03765-SS | uAuAusgsguauguuGfCfCfcguuugucca(NAG13) | 548 | UAUAUGGUAUGUUGCCCGUUUGUCCA | 120 |
| AM03767-SS | uAuAusgsuccguguGfCfAfcuucgcuuca(NAG13) | 549 | UAUAUGUCCGUGUGCACUUCGCUUCA | 122 |
| AM03769-SS | uAuAusgsccuguagGfCfAfuaaauuggua(NAG13) | 550 | UAUAUGCCUGUAGGCAUAAAUUGGUA | 111 |
| AM03771-SS | uAuAuscsaaccucuGfCfCfuaaucaucua(NAG13) | 551 | UAUAUCAACCUCUGCCUAAUCAUCUA | 113 |
| AM03914-SS | uAuAuusgsucugcgGfCfGfuuuuaucaua(NAG13) | 552 | UAUAUUGUCUGCGGCGUUUUAUCAUA | 112 |
| AM03915-SS | uAuAuusgsucugcgGfcGfuuuuaucaua(NAG13) | 553 | UAUAUUGUCUGCGGCGUUUUAUCAUA | 112 |
| AM03918-SS | uAuAuusgsugucugCfGfGfcguuuuauca(NAG13) | 554 | UAUAUUGUGUCUGCGGCGUUUUAUCA | 114 |
| AM03919-SS | uAuAuusgsugucugCfgGfcguuuuauca(NAG13) | 555 | UAUAUUGUGUCUGCGGCGUUUUAUCA | 114 |
| AM03963-SS | (Chol-TEG)uAuUfcUfgCfgGfCfGfuUfuUfaUfcAfuAf(invdT) | 556 | UAUUCUGCGGCGUUUUAUCAUAT | 104 |
| | (TEG-Biotin) | | | |
| AM03964-SS | (Chol-C6)uAuCfuGfuAfgGfCfAfuAfafuUfgGfuAf(invdT) | 557 | UAUCUGUAGGCAUAAAUUGGUAT | 103 |
| | (TEG-Biotin) | | | |
| AM04262-SS | uauauscsggcgcugAfAfUfcccgcggac(invdT)(NAG13) | 558 | UAUAUCGGCGCUGAAUCCCGCGGACT | 133 |
| AM04263-SS | uauausasccgggcgCfAfCfcucucuuua(invdA)(NAG13) | 559 | UAUAUACCGGGCGCACCUCUCUUUAA | 134 |
| AM04264-SS | uauausgsgaccgugUfGfCfacuucgcuu(invdA)(NAG13) | 560 | UAUAUGGACCGUGUGCACUUCGCUUA | 135 |
| AM04265-SS | uauaususccgugugCfAfCfuucgcuuca(invdA)(NAG13) | 561 | UAUAUUCCGUGUGCACUUCGCUUCAA | 136 |
| AM04266-SS | uauauscscgugugcAfCfUfucgcuucac(invdT)(NAG13) | 562 | UAUAUCCGUGUGCACUUCGCUUCACT | 137 |
| AM04267-SS | uauausgsugcacuuCfGfCfuucaccucu(invdA)(NAG13) | 563 | UAUAUGUGCACUUCGCUUCACCUCUA | 138 |
| AM04268-SS | uauaususgcacuucGfCfUfucaccucug(invdA)(NAG13) | 564 | UAUAUUGCACUUCGCUUCACCUCUGA | 139 |
| AM04269-SS | uauausgscacuucgCfUfUfcaccucugc(invdA)(1AG13) | 565 | UAUAUGCACUUCGCUUCACCUCUGCA | 140 |
| AM04270-SS | uauauscsccagcaaUfGfUfcaacgaccg(invdA)(NAG13) | 566 | UAUAUCCCAGCAAUGUCAACGACCGA | 141 |
| AM04271-SS | uauausasaugucaaCfGfAfccgaccuug(invdA)(NAG13) | 567 | UAUAUAAUGUCAACGACCGACCUUGA | 142 |
| AM04282-SS | uauausasggagauuAfGfGfuuaaagguc(invd4)(NAG13) | 568 | UAUAUAGGAGAUUAGGUUAAAGGUCA | 143 |
| AM04283-SS | uauaususaggaggcUfGfUfaggcauaaa(invdT)(NAG13) | 569 | UAUAUUAGGAGGCUGUAGGCAUAAAT | 144 |
| AM04284-SS | uauausasggaggcuGfUfAfggcauaaau(invdT)(NAG13) | 570 | UAUAUAGGAGGCUGUAGGCAUAAAUT | 145 |
| AM04285-SS | uauausgsgaggcugUfAfGfgcauaaauu(invdA)(NAG13) | 571 | UAUAUGGAGGCUGUAGGCAUAAAUUA | 146 |
| AM04286-SS | uauausgsaggcuguAfGfGfcauaaauug(invdA)(NAG13) | 572 | UAUAUGAGGCUGUAGGCAUAAAUUGA | 147 |
| AM04287-SS | uauausasggcuguaGfGfCfauaaauugg(invdA)(NAG13) | 573 | UAUAUAGGCUGUAGGCAUAAAUUGGA | 148 |
| AM04297-SS | uauausgscuggaugUfGfUfcugcggcgu(invdA)(NAG13) | 574 | UAUAUGCUGGAUGUGUCUGCGGCGUA | 149 |
| AM04298-SS | uauausgsgauguguCfUfGfcggcguuuu(invdA)(NAG13) | 575 | UAUAUGGAUGUGUCUGCGGCGUUUUA | 150 |
| AM04299-SS | uauausgsaugugucUfGfCfggcguuuua(invdA)(NAG13) | 576 | UAUAUGAUGUGUCUGCGGCGUUUUAA | 151 |
| AM04300-SS | uauausgsugucugcGfGfCfguuuuauca(invdA)(NAG13) | 577 | UAUAUGUGUCUGCGGCGUUUUAUCAA | 152 |
| AM04301-SS | uauaususaucaaggUfAfUfguugcccgu(invdA)(NAG13) | 578 | UAUAUUAUCAAGGUAUGUUGCCCGUA | 121 |
| AM04302-SS | uauausasucaagguAfUfGfuugcccguu(invdA)(NAG13) | 579 | UAUAUAUCAAGGUAUGUUGCCCGUUA | 118 |
| AM04303-SS | uauaususcaagguaUfGfUfugcccguuu(invdA)(NAG13) | 580 | UAUAUUCAAGGUAUGUUGCCCGUUUA | 153 |
| AM04304-SS | uauauscsaagguauGfUfUfgcccguuug(invdA)(NAG13) | 581 | UAUAUCAAGGUAUGUUGCCCGUUUGA | 154 |
| AM04305-SS | uauausasagguaugUfUfGfcccguuugu(invdA)(NAG13) | 582 | UAUAUAAGGUAUGUUGCCCGUUUGUA | 155 |
| AM04306-SS | uauausgsuauguugCfCfCfguuuguccu(invdA)(NAG13) | 583 | UAUAUGUAUGUUGCCCGUUUGUCCUA | 156 |
| AM04307-SS | uauaususccuggcuCfAfGfuuuacuagu(invdA)(NAG13) | 584 | UAUAUUCCUGGCUCAGUUUACUAGUA | 119 |
| AM04308-5S | uauaususggcucagUfUfUfacuagugcc(invdA)(NAG13) | 585 | UAUAUUGGCUCAGUUUACUAGUGCCA | 157 |
| AM04309-SS | uauausgsgcucaguUfUfAfcuagugcca(invdA)(NAG13) | 586 | UAUAUGGCUCAGUUUACUAGUGCCAA | 158 |
| AM04310-SS | uauauscsucaguuuAfCfUfagugccauu(invdA)(NAG13) | 587 | UAUAUCUCAGUUUACUAGUGCCAUUA | 159 |
| AM04311-SS | uauaususcaguuuaCfUfAfgugccauuu(invdA)(NAG13) | 588 | UAUAUUCAGUUUACUAGUGCCAUUUA | 160 |
| AM04312-SS | uauauscsaguuuacUfAfGfugccauuug(invdA)(NAG13) | 589 | UAUAUCAGUUUACUAGUGCCAUUUGA | 161 |
| AM04313-SS | uauausasguuuacuAfGfUfgccauuugu(invdA)(NAG13) | 590 | UAUAUAGUUUACUAGUGCCAUUUGUA | 162 |
| AM04314-SS | uauaususuacuaguGfCfCfauuuguuca(invdA)(NAG13) | 591 | UAUAUUUACUAGUGCCAUUUGUUCAA | 163 |
| AM04315-SS | uauaususacuagugCfCfAfuuuguucag(invdT)(NAG13) | 592 | UAUAUUACUAGUGCCAUUUGUUCAGT | 164 |
| AM04316-SS | uauausgsugccauuUfGfUfucagugguu(invdA)(NAG13) | 593 | UAUAUGUGCCAUUUGUUCAGUGGUUA | 165 |
| AM04317-SS | uauaususgccauuuGfUfUfcagugguuc(invdA)(NAG13) | 594 | UAUAUUGCCAUUUGUUCAGUGGUUCA | 117 |
| AM04318-SS | uauausgsccauuugUfUfCfagugguucg(invdA)(NAG13) | 595 | UAUAUGCCAUUUGUUCAGUGGUUCGA | 167 |
| AM04319-SS | uauausasugcaacuUfUfUfucaccucug(invdA)(NAG13) | 596 | UAUAUAUGCAACUUUUUCACCUCUGA | 168 |
| AM04320-SS | uauaususgcaacuuUfUfUfcaccucugc(invdA)(NAG13) | 597 | UAUAUUGCAACUUUUUCACCUCUGCA | 169 |
| AM04321-SS | uauaususucaccucUfGfCfcuaaucauc(invdA)(NA(313) | 598 | UAUAUUUCACCUCUGCCUAAUCAUCA | 170 |
| AM04322-SS | uauauscsaccucugCfCfUfaaucaucuc(invdA)(NAG13) | 599 | UAUAUCACCUCUGCCUAAUCAUCUCA | 171 |
| AM04349-SS | uauauscscacagagUfCfUfagacucgug(invdA)(NAG13) | 600 | UAUAUCCACAGAGUCUAGACUCGUGA | 172 |
| AM04350-SS | uauaususcguggugGfAfCfuucucucaa(invdT)(NAG13) | 601 | UAUAUUCGUGGUGGACUUCUCUCAAT | 173 |
| AM04351-SS | uauauscsgugguggAfCfUfucucucaau(invdT)(NAG13) | 602 | UAUAUCGUGGUGGACUUCUCUCAAUT | 174 |
| AM04352-SS | uauausgsgacuucuCfUfCfaauuuucua(invdA)(NAG13) | 603 | UAUAUGGACUUCUCUCAAUUUUCUAA | 175 |
| AM04353-SS | uauaususgccaaguGfUfUfugcugacgc(invdA)(NAG13) | 604 | UAUAUUGCCAAGUGUUUGCUGACGCA | 116 |
| AM04354-SS | uauausgsgcuccucUfGfCfcgauccaua(invdA)(NAG13) | 605 | UAUAUGGCUCCUCUGCCGAUCCAUAA | 176 |
| AM04355-SS | uauaususccucugcCfGfAfuccauacug(invdA)(NAG13) | 606 | UAUAUUCCUCUGCCGAUCCAUACUGA | 177 |
| AM04356-SS | uauausgsauccauaCfUfGfcggaacucc(invdA)(NAG13) | 607 | UAUAUGAUCCAUACUGCGGAACUCCA | 178 |
| AM04444-SS | (NAG25)uusgsccuguagGfCfAfuaaauugguaus(invdT) | 608 | UUGCCUGUAGGCAUAAAUUGGUAUT | 179 |
| AM04445-SS | (NAG25)uauausgsccuguagGfCfAfuaaauuggu(invdA) | 609 | UAUAUGCCUGUAGGCAUAAAUUGGUA | 111 |
| AM04449-SS | (NAG25)uusgsuccguguGfCfAfcuucgcuucaus(invdT) | 610 | UUGUCCGUGUGCACUUCGCUUCAUT | 180 |
| AM04458-SS | (NAG25)uusgsguauguuGfCfCfcguuuguccaus(invdT) | 611 | UUGGUAUGUUGCCCGUUUGUCCAUT | 181 |
| AM04659-SS | gsusguGfcAfCfUfucgcuucaca(NAG13) | 612 | GUGUGCACUUCGCUUCACA | 182 |
| AM04660-SS | gsgsuggaCfuUfCfUfcucaAfUfuuua(NAG13) | 613 | GGUGGACUUCUCUCAAUUUUA | 166 |
| AM04682-SS | (NAG25)gsusguGfcAfCfUfucgcuucaCM(invdA) | 614 | GUGUGCACUUCGCUUCACA | 182 |
| AM04683-SS | (NAG25)gsgsuggaCfuUfCfUfcucaAfUfuuTM(invdA) | 615 | GGUGGACUUCUCUCAAUUUTA | 183 |
| AM04745-SS | (NAG25)cgcggusccgugugCfAfCfuucgcuucAM(invdA) | 616 | CGCGGUCCGUGUGCACUUCGCUUCAA | 184 |
| AM04748-SS | (NAG25)gcggucscgugugcAfCfUfucgcuucaCM(invdA) | 617 | GCGGUCCGUGUGCACUUCGCUUCACA | 185 |
| AM04751-SS | (NAG25)gcggausgugucugCfGfGfcguuuuauCM(invdA) | 618 | GCGGAUGUGUCUGCGGCGUUUUAUCA | 186 |
| AM04754-SS | (NAG25)gcgugusgucugcgGfCfGfuuuuaucaTM(invdA) | 619 | GCGUGUGUCUGCGGCGUUUUAUCATA | 187 |
| AM04757-SS | (NAG25)gcggucscgugugcAfCfUfucgcuucaCM(invdT) | 620 | GCGGUCCGUGUGCACUUCGCUUCACT | 188 |
| AM04759-SS | (NAG25)gcgugusgucugcgGfCfGfuuuuaucaTM(invdT) | 621 | GCGUGUGUCUGCGGCGUUUUAUCATT | 189 |
| AM04761-SS | (NAG25)gcgcggsuccguguGfCfAfcuucgcuuCM(invdA) | 622 | GCGCGGUCCGUGUGCACUUCGCUUCA | 190 |
| AM04764-SS | (NAG25)gcgaagsguauguuGfCfCfcguuugucCM(invdA) | 623 | GCGAAGGUAUGUUGCCCGUUUGUCCA | 191 |
| AM04767-SS | (NAG25)gcggagsgcuguagGfCfAfuaaauuggTM(invdA) | 624 | GCGGAGGCUGUAGGCAUAAAUUGGTA | 192 |
| AM04781-SS | uGfuAfgGfcAfuAfaAfuUfgGfuAf(invdT) | 625 | UGUAGGCAUAAAUUGGUAT | 193 |
| AM04783-SS | cCfuCfuGfcCfuAfaUfcAfuCfuAf(invdT) | 626 | CCUCUGCCUAAUCAUCUAT | 194 |
| AM04787-SS | cUfgCfgGfCfGfuUfuUfaUfcAfuAf(invdT) | 627 | CUGCGGCGUUUUAUCAUAT | 195 |
| AM04788-SS | uGfuAfgGfCfAfuAfaAfuUfgGfuAf(invdT) | 628 | UGUAGGCAUAAAUUGGUAT | 193 |
| AM05010-SS | (NAG25)scsuguagGfCfAfuaaauugguauus(invAb) | 629 | CUGUAGGCAUAAAUUGGUAUUx | 196 |
| AM05015-SS | (NAG25)sgsccuguagGfCfAfuaaauugguas(invAb) | 630 | GCCUGUAGGCAUAAAUUGGUAx | 197 |
| AM05016-SS | (NAG25)sgsccuguagGfCfAfuaaauuggus(invdA) | 631 | GCCUGUAGGCAUAAAUUGGUA | 198 |
| AM05017-SS | (NAG25)sgsccuguagGfCfAfuaaauugguAMs(invAb) | 632 | GCCUGUAGGCAUAAAUUGGUAx | 197 |
| AM05018-SS | (NAG25)sgsccuguagGfCfAfuaaauuggTMAMs(invAb) | 633 | GCCUGUAGGCAUAAAUUGGTAx | 199 |
| AM05019-SS | (NAG25)sasacuguagGfCfAfuaaauugguas(invAb) | 634 | AACUGUAGGCAUAAAUUGGUAx | 200 |
| AM05034-SS | (NAG25)suscguggugGfAfCfuucucucaaus(invAb) | 635 | UCGUGGUGGACUUCUCUCAAUx | 201 |
| AM05046-SS | (NAG25)sasaguggugGfAfCfuucucucaaus(invAb) | 636 | AAGUGGUGGACUUCUCUCAAUx | 202 |
| AM05047-SS | (NAG25)suscguggugGfAfCfuucucucaAMTMs(invAb) | 637 | UCGUGGUGGACUUCUCUCAATx | 203 |
| AM05048-SS | (NAG25)scsgugguggAfCfUfucucucaauus(invAb) | 638 | CGUGGUGGACUUCUCUCAAUUx | 204 |
| AM05049-SS | (NAG25)sasaugguggAfCfUfucucucaauus(invAb) | 639 | AAUGGUGGACUUCUCUCAAUUx | 205 |
| AM05050-SS | (NAG25)scsgugguggAfCfUfucucucaaTMTMs(invAb) | 640 | CGUGGUGGACUUCUCUCAATTx | 206 |
| AM05051-SS | (NAG25)sgsgacuucuCfUfCfaauuuucuaas(invAb) | 641 | GGACUUCUCUCAAUUUUCUAAx | 207 |
| AM05063-SS | (NAG25)scsgugguggAfCfUfucucucaauas(invAb) | 642 | CGUGGUGGACUUCUCUCAAUAx | 208 |
| AM05064-SS | (NAG25)suscguggugGfAfCfuucucucaaas(invAb) | 643 | UCGUGGUGGACUUCUCUCAAAx | 209 |

TABLE 2
Examples of HBV RNAi trigger duplexes.

| | Antisense | Sense Strand |
|---|---|---|
| Duplex ID | Strand ID | ID |
| AD00003 | AM00006-AS | AM00005-SS |
| AD00004 | AM00008-AS | AM00007-SS |
| AD00005 | AM00010-AS | AM00009-SS |
| AD00007 | AM00010-AS | AM00013-SS |
| AD00008 | AM00010-AS | AM00014-SS |
| AD00009 | AM00006-AS | AM00015-SS |
| AD00010 | AM00010-AS | AM00016-SS |
| AD00022 | AM00010-AS | AM00039-SS |
| AD00073 | AM00139-AS | AM00138-SS |
| AD00076 | AM00006-AS | AM00029-SS |
| AD00077 | AM00006-AS | AM00179-SS |
| AD00078 | AM00006-AS | AM00177-SS |
| AD00079 | AM00006-AS | AM00175-SS |
| AD00081 | AM00010-AS | AM00180-SS |
| AD00082 | AM00010-AS | AM00178-SS |
| AD00083 | AM00010-AS | AM00176-SS |
| AD00131 | AM00194-AS | AM00029-SS |
| AD00132 | AM00195-AS | AM00029-SS |
| AD00239 | AM00010-AS | AM00429-SS |
| AD00240 | AM00010-AS | AM00430-SS |
| AD00241 | AM00010-AS | AM00431-SS |
| AD00242 | AM00010-AS | AM00432-SS |
| AD00243 | AM00010-AS | AM00433-SS |
| AD00244 | AM00010-AS | AM00434-SS |
| AD00245 | AM00010-AS | AM00435-SS |
| AD00246 | AM00010-AS | AM00436-SS |
| AD00247 | AM00010-AS | AM00437-SS |
| AD00248 | AM00438-AS | AM00039-SS |
| AD00249 | AM00439-AS | AM00039-SS |
| AD00250 | AM00010-AS | AM00442-SS |
| AD00251 | AM00006-AS | AM00440-SS |
| AD00252 | AM00006-AS | AM00441-SS |
| AD00253 | AM00010-AS | AM00443-SS |
| AD00341 | AM00006-AS | AM00620-SS |
| AD00342 | AM00010-AS | AM00621-SS |
| AD00709 | AM01463-AS | AM00620-SS |
| AD00710 | AM01464-AS | AM00621-SS |
| AD01099 | AM01933-AS | AM01934-SS |
| AD01100 | AM01935-AS | AM01936-SS |
| AD01101 | AM01937-AS | AM00434-SS |
| AD01102 | AM01938-AS | AM01939-SS |
| AD01103 | AM01942-AS | AM00138-SS |
| AD01104 | AM01943-AS | AM00138-SS |
| AD01105 | AM01944-AS | AM01940-SS |
| AD01106 | AM01945-AS | AM01940-SS |
| AD01107 | AM01946-AS | AM01941-SS |
| AD01108 | AM01947-AS | AM01941-SS |
| AD01129 | AM00006-AS | AM01885-SS |
| AD01130 | AM00010-AS | AM01886-SS |
| AD01137 | AM00139-AS | AM01965-SS |
| AD01138 | AM00006-AS | AM01963-SS |
| AD01139 | AM00010-AS | AM01964-SS |
| AD01140 | AM00008-AS | AM01979-SS |
| AD01141 | AM01985-AS | AM01979-SS |
| AD01142 | AM01986-AS | AM01979-SS |
| AD01143 | AM01987-AS | AM01991-SS |
| AD01144 | AM01988-AS | AM01992-SS |
| AD01145 | AM01989-AS | AM01991-SS |
| AD01146 | AM01990-AS | AM01992-SS |
| AD01167 | AM00008-AS | AM01984-SS |
| AD01245 | AM00439-AS | AM01964-SS |
| AD01246 | AM01937-AS | AM02080-SS |
| AD01247 | AM01938-AS | AM02081-SS |
| AD01248 | AM00194-AS | AM01963-SS |
| AD01249 | AM01933-AS | AM02082-SS |
| AD01250 | AM01935-AS | AM02083-SS |
| AD01310 | AM01986-AS | AM01984-SS |
| AD01319 | AM01988-AS | AM02189-SS |
| AD01320 | AM01990-AS | AM02189-SS |
| AD01358 | AM02276-AS | AM02278-SS |
| AD01359 | AM02277-AS | AM02083-SS |
| AD01360 | AM02280-AS | AM02283-SS |
| AD01361 | AM02281-AS | AM02081-SS |
| AD01362 | AM02286-AS | AM02285-SS |
| AD01363 | AM02287-AS | AM02187-SS |
| AD01364 | AM02288-AS | AM02291-SS |
| AD01365 | AM02289-AS | AM02189-SS |
| AD01382 | AM02312-AS | AM02316-SS |
| AD01383 | AM02313-AS | AM02317-SS |
| AD01384 | AM02314-AS | AM02318-SS |
| AD01385 | AM02315-AS | AM02319-SS |
| AD01386 | AM02312-AS | AM02320-SS |
| AD01387 | AM02313-AS | AM02321-SS |
| AD01388 | AM02314-AS | AM02322-SS |
| AD01389 | AM02315-AS | AM02323-SS |
| AD01425 | AM02366-AS | AM02370-SS |
| AD01426 | AM02367-AS | AM02371-SS |
| AD01427 | AM02368-AS | AM02372-SS |
| AD01428 | AM02369-AS | AM02373-SS |
| AD01429 | AM02374-AS | AM02378-SS |
| AD01430 | AM02375-AS | AM02379-SS |
| AD01431 | AM02376-AS | AM02380-SS |
| AD01432 | AM02377-AS | AM02381-SS |
| AD01433 | AM02382-AS | AM02386-SS |
| AD01434 | AM02383-AS | AM02387-SS |
| AD01435 | AM02384-AS | AM02388-SS |
| AD01436 | AM02385-AS | AM02389-SS |
| AD01438 | AM02391-AS | AM02320-SS |
| AD01439 | AM02392-AS | AM02317-SS |
| AD01440 | AM02393-AS | AM02321-SS |
| AD01461 | AM02392-AS | AM02319-SS |
| AD01493 | AM02315-AS | AM02483-SS |
| AD01494 | AM02484-AS | AM02483-SS |
| AD01495 | AM02485-AS | AM02486-SS |
| AD01496 | AM00008-AS | AM02486-SS |
| AD01497 | AM00008-AS | AM02489-SS |
| AD01562 | AM02575-AS | AM02576-SS |
| AD01563 | AM02577-AS | AM02578-SS |
| AD01785 | AM02889-AS | AM02888-SS |
| AD01786 | AM02892-AS | AM02891-SS |
| AD01787 | AM02895-AS | AM02894-SS |
| AD01788 | AM02898-AS | AM02897-SS |
| AD01789 | AM02901-AS | AM02900-SS |
| AD01790 | AM02904-AS | AM02903-SS |
| AD01791 | AM02907-AS | AM02906-SS |
| AD01792 | AM02910-AS | AM02909-SS |
| AD01793 | AM02913-AS | AM02912-SS |
| AD01794 | AM02916-AS | AM02915-SS |
| AD01795 | AM02919-AS | AM02918-SS |
| AD01796 | AM02922-AS | AM02921-SS |
| AD01797 | AM02925-AS | AM02924-SS |
| AD01798 | AM02928-AS | AM02927-SS |
| AD01799 | AM02931-AS | AM02930-SS |
| AD01800 | AM02934-AS | AM02933-SS |
| AD01801 | AM02937-AS | AM02936-SS |
| AD01802 | AM02940-AS | AM02939-SS |
| AD01875 | AM02975-AS | AM02978-SS |
| AD01876 | AM02975-AS | AM02979-SS |
| AD01877 | AM02976-AS | AM02981-SS |
| AD01878 | AM02982-AS | AM02987-SS |
| AD01879 | AM02982-AS | AM02988-SS |
| AD01880 | AM02983-AS | AM02990-SS |
| AD01881 | AM02984-AS | AM02992-SS |
| AD01882 | AM02984-AS | AM02993-SS |
| AD01883 | AM02985-AS | AM02995-SS |
| AD01956 | AM03097-AS | AM03087-SS |
| AD01957 | AM03098-AS | AM03088-SS |
| AD01958 | AM03099-AS | AM03089-SS |
| AD01959 | AM03100-AS | AM03090-SS |
| AD01960 | AM03101-AS | AM03091-SS |
| AD01961 | AM03102-AS | AM03092-SS |
| AD01962 | AM03103-AS | AM03093-SS |
| AD01963 | AM03104-AS | AM03094-SS |
| AD01964 | AM03105-AS | AM03095-SS |
| AD01965 | AM03106-AS | AM03096-SS |
| AD02718 | AM03495-AS | AM03493-SS |
| AD02719 | AM03495-AS | AM03496-SS |
| AD02720 | AM03495-AS | AM03494-SS |
| AD02721 | AM03500-AS | AM03497-SS |
| AD02722 | AM03500-AS | AM03498-SS |
| AD02723 | AM03500-AS | AM03499-SS |
| AD02724 | AM03504-AS | AM03501-SS |
| AD02725 | AM03504-AS | AM03502-SS |
| AD02726 | AM03504-AS | AM03503-SS |
| AD02727 | AM03508-AS | AM03505-SS |
| AD02728 | AM03508-AS | AM03506-SS |
| AD02729 | AM03508-AS | AM03507-SS |
| AD02730 | AM03512-AS | AM03509-SS |
| AD02731 | AM03512-AS | AM03510-SS |
| AD02732 | AM03512-AS | AM03511-SS |
| AD02933 | AM03495-AS | AM03763-SS |
| AD02934 | AM03764-AS | AM03494-SS |
| AD02935 | AM03764-AS | AM03763-SS |
| AD02936 | AM03764-AS | AM03496-SS |
| AD02937 | AM03500-AS | AM03765-SS |
| AD02938 | AM03766-AS | AM03499-SS |
| AD02939 | AM03766-AS | AM03765-SS |
| AD02940 | AM03504-AS | AM03767-SS |
| AD02941 | AM03768-AS | AM03503-SS |
| AD02942 | AM03768-AS | AM03767-SS |
| AD02943 | AM03508-AS | AM03769-SS |
| AD02944 | AM03770-AS | AM03507-SS |
| AD02945 | AM03770-AS | AM03769-SS |
| AD02946 | AM03512-AS | AM03771-SS |
| AD02947 | AM03772-AS | AM03511-SS |
| AD02948 | AM03772-AS | AM03771-SS |
| AD03055 | AM03864-AS | AM03765-SS |
| AD03056 | AM03865-AS | AM03499-SS |
| AD03057 | AM03865-AS | AM03765-SS |
| AD03096 | AM03912-AS | AM03914-SS |
| AD03097 | AM03913-AS | AM03914-SS |
| AD03098 | AM03912-AS | AM03915-SS |
| AD03099 | AM03913-AS | AM03915-SS |
| AD03100 | AM03916-AS | AM03918-SS |
| AD03101 | AM03917-AS | AM03918-SS |
| AD03102 | AM03916-AS | AM03919-SS |
| AD03103 | AM03917-AS | AM03919-SS |
| AD03153 | AM02315-AS | AM03963-SS |
| AD03154 | AM02312-AS | AM03964-SS |
| AD03217 | AM04041-AS | AM03765-SS |
| AD03218 | AM04042-AS | AM03507-SS |
| AD03350 | AM04249-AS | AM00620-SS |
| AD03363 | AM04272-AS | AM04262-SS |
| AD03364 | AM04273-AS | AM04263-SS |
| AD03365 | AM04274-AS | AM04264-SS |
| AD03366 | AM04275-AS | AM04265-SS |
| AD03367 | AM04276-AS | AM04266-SS |
| AD03368 | AM04277-AS | AM04267-SS |
| AD03369 | AM04278-AS | AM04268-SS |
| AD03370 | AM04279-AS | AM04269-SS |
| AD03371 | AM04280-AS | AM04270-SS |
| AD03372 | AM04281-AS | AM04271-SS |
| AD03373 | AM04288-AS | AM04282-SS |
| AD03374 | AM04289-AS | AM04283-SS |
| AD03375 | AM04290-AS | AM04284-SS |
| AD03376 | AM04291-AS | AM04285-SS |
| AD03377 | AM04292-AS | AM04286-SS |
| AD03378 | AM04293-AS | AM04287-SS |
| AD03381 | AM04323-AS | AM04297-SS |
| AD03382 | AM04324-AS | AM04298-SS |
| AD03383 | AM04325-AS | AM04299-SS |
| AD03384 | AM04326-AS | AM04300-SS |
| AD03385 | AM04327-AS | AM04301-SS |
| AD03386 | AM04328-AS | AM04302-SS |
| AD03387 | AM04329-AS | AM04303-SS |
| AD03388 | AM04330-AS | AM04304-SS |
| AD03389 | AM04331-AS | AM04305-SS |
| AD03390 | AM04332-AS | AM04306-SS |
| AD03391 | AM04333-AS | AM04307-SS |
| AD03392 | AM04334-AS | AM04308-SS |
| AD03393 | AM04335-AS | AM04309-SS |
| AD03394 | AM04336-AS | AM04310-SS |
| AD03395 | AM04337-AS | AM04311-SS |
| AD03396 | AM04338-AS | AM04312-SS |
| AD03397 | AM04339-AS | AM04313-SS |
| AD03398 | AM04340-AS | AM04314-SS |
| AD03399 | AM04341-AS | AM04315-SS |
| AD03400 | AM04342-AS | AM04316-SS |
| AD03401 | AM04343-AS | AM04317-SS |
| AD03402 | AM04344-AS | AM04318-SS |
| AD03403 | AM04345-AS | AM04319-SS |
| AD03404 | AM04346-AS | AM04320-SS |
| AD03405 | AM04347-AS | AM04321-SS |
| AD03406 | AM04348-AS | AM04322-SS |
| AD03407 | AM04357-AS | AM04349-SS |
| AD03408 | AM04358-AS | AM04350-SS |
| AD03409 | AM04359-AS | AM04351-SS |
| AD03410 | AM04360-AS | AM04352-SS |
| AD03411 | AM04361-AS | AM04353-SS |
| AD03412 | AM04362-AS | AM04354-SS |
| AD03413 | AM04363-AS | AM04355-SS |
| AD03414 | AM04364-AS | AM04356-SS |
| AD03498 | AM03508-AS | AM04445-SS |
| AD03499 | AM04441-AS | AM04444-SS |
| AD03500 | AM04442-AS | AM04444-SS |
| AD03501 | AM04443-AS | AM04444-SS |
| AD03502 | AM04446-AS | AM04449-SS |
| AD03503 | AM04447-AS | AM04449-SS |
| AD03504 | AM04448-AS | AM04449-SS |
| AD03509 | AM04459-AS | AM04458-SS |
| AD03510 | AM04460-AS | AM04458-SS |
| AD03511 | AM04461-AS | AM04458-SS |
| AD03669 | AM04661-AS | AM04659-SS |
| AD03670 | AM04662-AS | AM04660-SS |
| AD03679 | AM04661-AS | AM04682-SS |
| AD03680 | AM04662-AS | AM04683-SS |
| AD03724 | AM04746-AS | AM04745-SS |
| AD03725 | AM04747-AS | AM04745-SS |
| AD03726 | AM04749-AS | AM04748-SS |
| AD03727 | AM04750-AS | AM04748-SS |
| AD03728 | AM04752-AS | AM04751-SS |
| AD03729 | AM04753-AS | AM04751-SS |
| AD03730 | AM04755-AS | AM04754-SS |
| AD03731 | AM04756-AS | AM04754-SS |
| AD03732 | AM04758-AS | AM04757-SS |
| AD03733 | AM04760-AS | AM04759-SS |
| AD03734 | AM04762-AS | AM04761-SS |
| AD03735 | AM04763-AS | AM04761-SS |
| AD03736 | AM04765-AS | AM04764-SS |
| AD03737 | AM04766-AS | AM04764-SS |
| AD03738 | AM04768-AS | AM04767-SS |
| AD03739 | AM04769-AS | AM04767-SS |
| AD03750 | AM04782-AS | AM04781-SS |
| AD03751 | AM04784-AS | AM04783-SS |
| AD03753 | AM02609-AS | AM04787-SS |
| AD03754 | AM04789-AS | AM04788-SS |
| AD03967 | AM04443-AS | AM05010-SS |
| AD03968 | AM05011-AS | AM05010-SS |
| AD03969 | AM04443-AS | AM05015-SS |
| AD03970 | AM05011-AS | AM05019-SS |
| AD03971 | AM05012-AS | AM05015-SS |
| AD03972 | AM04443-AS | AM05016-SS |
| AD03973 | AM04443-AS | AM05017-SS |
| AD03974 | AM04443-AS | AM05018-SS |
| AD03975 | AM05013-AS | AM05015-SS |
| AD03976 | AM05014-AS | AM05019-SS |
| AD03977 | AM05013-AS | AM05017-SS |
| AD03978 | AM05013-AS | AM04444-SS |
| AD04001 | AM05052-AS | AM05034-SS |
| AD04002 | AM05053-AS | AM05034-SS |
| AD04003 | AM05054-AS | AM05046-SS |
| AD04004 | AM05052-AS | AM05047-SS |
| AD04005 | AM05055-AS | AM05064-SS |
| AD04006 | AM05056-AS | AM05048-SS |
| AD04007 | AM05057-AS | AM05048-SS |
| AD04008 | AM05058-AS | AM05049-SS |
| AD04009 | AM05056-AS | AM05050-SS |
| AD04010 | AM05060-AS | AM05063-SS |
| AD04011 | AM05061-AS | AM05051-SS |
| AD04012 | AM05062-AS | AM05051-SS |

[0054] In some embodiments, an HBV RNAi trigger is prepared or provided as a salt, mixed salt, or a free-acid.

[0055] Targeting groups and linking groups, as indicated in Tables 1A and 1B, include, but are not limited to, (Chol-TEG). (Chol-C6), (Chol-ALNY), (NH2-C6), (C6-SS-Alk-Me), (Alk-SS-C6), (C11-PEG3-NAG3), (NAG13), (NAG25), (Toc), and (TEG-Biotin). In some embodiments, any of the HBV RNAi trigger sense strands listed in Table 1B which contains a 3 or 5′ targeting group or linking group, may alternatively contain no 3′ or 5′ targeting group or linking group, or may contain a different 3′ or 5′ targeting group or linking group.

[0056] Structures for targeting groups and linking groups linked the RNAi trigger indicated in Table 1B are shown below and in FIG. 1 and FIG. 2. (RNAi trigger is indicated by RNA or trigger).

[chemical structure]

[chemical structure]

[chemical structure]

### In Vivo Delivery

[0057] Described herein are methods for delivering HBV RNAi triggers to liver cells in a mammal in vivo. In some embodiments, a delivery vehicle may be used. A delivery vehicle is a compound which improves delivery of the RNAi agent to the cell. A delivery vehicle can be, but is not limited to: a polymer, such as an amphipathic polymer, membrane active polymer, a peptide, such as a melittin or melittin-like peptide, a reversibly modified polymer or peptide, or a lipid. In some embodiments, an HBV RNAi trigger is linked to a targeting ligand that comprises a galactose derivative. In some embodiments, an HBV RNAi trigger is linked to a targeting ligand that comprises or consists of a galactose trimer. In some embodiments, HBV RNAi trigger delivery systems are described comprising a small delivery peptide, MLP, derived from bee venom peptide and one or more independently targeted HBV RNAi triggers.

[0058] In some embodiments, an RNAi trigger as described herein is linked to a galactose trimer. As used herein, a galactose trimer comprises a molecule having three or four terminal galactose derivatives. As used herein, the term galactose derivative includes both galactose and derivatives of galactose having affinity for the asialoglycoprotein receptor equal to or greater than that of galactose. A galactose trimer contains three or four galactose derivatives each linked to a central branch point through its C-1 carbon. In some embodiments, a galactose derivative is linked to the branch point via a linker or spacer. In some embodiments, the linker or spacer is a flexible hydrophilic spacer (U.S. Pat. No. 5,885,968; Biessen et al. J. Med. Chem. 1995 Vol. 39 p. 1538-1546), such as, but not limited to: a PEG spacer. In some embodiments, the PEG spacer is a PEG₃ spacer. The branch point can be any small molecule which permits attachment of three to four galactose derivatives and further permits attachment of the branch point to the RNAi agent. Attachment of the branch point to the RNAi agent may occur through a linker or spacer. In some embodiments, the linker or spacer comprises a flexible hydrophilic spacer, such as, but not limited to: a PEG spacer. In some embodiments, a PEG spacer is a PEG₃ spacer (three ethylene units). In other embodiments, the PEG spacer has 1 to 20 ethylene units (PEG₁ to PEG₂₀). In some embodiments, a galactose derivative comprises an N-acetylgalactosamine (GaINAc or NAG). Other saccharides having affinity for the asialoglycoprotein receptor may be selected from the list comprising: galactose, galactosamine, N-formyl-galactosamine, N-acetyl-galactosamine, N-propionyl-galactosamine, N-n-butanoylgalactosamine, and N-iso-butanoylgalactosamine. The affinities of numerous galactose derivatives for the asialoglycoprotein receptor have been studied (see for example: Iobst, S. T. and Drickamer, K. J.B.C. 1996, 271, 6686) or are readily determined using methods well known and commonly used in the art. Other terms common in the art for galactose trimer having three terminal galactose derivatives include tri-antennary galactose, tri-valent galactose. Other terms common in the art for galactose trimer include galactose cluster. It is known that tri-antennary galactose derivative clusters are bound to the ASGPr with greater affinity than bi-antennary or mono-antennary galactose derivative structures (Baenziger and Fiete, 1980, Cell, 22, 611-620; Connolly et al., 1982, J. Biol. Chem., 257, 939-945).

[0059] In some embodiments compositions are described comprising:

MLP-(L-M)ₓ plus N-T,

[0060] wherein N is a HBV RNAi trigger, T is a targeting group (comprising a hydrophobic group having 20 or more carbon atoms, such as a cholesterol), MLP is a melitiin-like peptide as describe herein, and masking agent M contains an ASGPr ligand as described herein covalently linked to MLP via a physiologically labile reversible linkage L. As used herein, MLP-(L-M), is an MLP delivery peptide or delivery peptide. Cleavage of L restores an unmodified amine on MLP. In some embodiments, optional group Y is linked to the amino terminal end, carboxyl terminal end, or cysteine of an MLP. If present, Y can comprise: an ASGPr ligand, a polyethyleneglycol (PEG), or an ASGPr ligand-PEG, x is an integer greater than 1. In its unmodified state, MLP is membrane active. However, delivery peptide MLP-(L-M), is not membrane active. Reversible modification of MLP primary amines, by attachment of M, reversibly inhibits or inactivates membrane activity of MLP. A sufficient percentage of MLP primary amines are modified to inhibit membrane activity of the polymer and provide for hepatocyte targeting. In some embodiments, x has a value greater than 80%, greater than 90%, or greater than 95% of the number of primary amines on MLP, as determined by the quantity of primary amines on MLP in the absence of any masking agents. More specifically, x has a value greater than 8(0% and up to 100% of the primary amines on MLP. It is noted that MLP typically contains 3-5 primary amines (including the amino terminus (if unmodified) and typically 2-4 Lysine residues). Therefore, modification of a percentage of amines is meant to reflect the modification of a percentage of MLP amines in a population of MLPs. A population of MLPs means the population of MLPs in a defined sample size that would be relevant to a person of ordinary skill in the art, such as the population in a container, dose, or manufactured batch. In some embodiments, the population of MLPs is the pool of MLP in a manufactured batch. Upon cleavage of reversible linkages L, unmodified amines are restored thereby reverting MLP to its unmodified, membrane active state. In some embodiments, a reversible linkage is a pH labile linkage, such as a disubstituted maleamate linkage. MLP-(L-M)ₓ, an ASGPr-targeted reversibly masked membrane active polymer (delivery peptide), and T-N, a polynucleotide-conjugate, are synthesized or manufactured separately. Neither T nor N are covalently linked directly or indirectly to MLP, L, or M. Electrostatic or hydrophobic association of the polynucleotide or the polynucleotide-conjugate with the masked or unmasked polymer is not required for in vivo liver delivery of the polynucleotide. The masked polymer and the polynucleotide conjugate can be supplied in the same container or in separate containers. They may be combined prior to administration, co-administered, or administered sequentially.

[0061] In some embodiments, an ASGPr-targeted reversibly masked MLP comprises an MLP reversibly modified by reaction of primary amines on the peptide with ASGPr ligand-containing masking agents. An amine is reversibly modified if cleavage of the modifying group restores the amine. Reversible modification of the MLP with the masking agents disclosed herein reversibly inhibits membrane activity of the MLP. In the masked state, the reversibly masked MLP does not exhibit membrane disruptive activity. In some embodiments, more than 80%, or more than 90%, of the amines on the MLP are reversibly modified.

[0062] MLP, as used herein, is a small amphipathic membrane active peptide, comprising about 23 to about 32 amino acids, derived from the naturally occurring in bee venom peptide melittin. The naturally occurring melittin contains 26 amino acids and is predominantly hydrophobic on the amino terminal end and predominantly hydrophilic (cationic) on the carboxy terminal end. In some embodiments, an MLP is isolated from a biological source or synthetic. A synthetic polymer is formulated or manufactured by a chemical process “by man” and is not created by a naturally occurring biological process. As used herein, MLP encompasses the naturally occurring bee venom peptides of the MLP family that can be found in, for example, venom of the species: Apis florea, Apis mellifera, Apis cerana, Apis dorsata, Vespula maculifrons, Vespa magnmfica, Vespa velutina, Polistes sp. HQL-2001, and Polistes hebraeus. As used herein, MLP also encompasses synthetic peptides having amino acid sequence identical to or similar to naturally occurring MLPs. Specifically. MLP amino acid sequence encompass those shown in Table 3. In addition to the amino acids which retain melittin's inherent high membrane activity, 1-8 amino acids can be added to the amino or carboxy terminal ends of the peptide. Specifically, cysteine residues can be added to the amino or carboxy termini. The list in Table 3 is not meant to be exhaustive, as other conservative amino acid substitutions are readily envisioned. Synthetic MLPs can contain naturally occurring L form amino acids or the enantiomeric D form amino acids (inverso). The MLP amino acid sequence can also be reversed (retro). Retro MLP can have L form amino acids or D form amino acids (retroinverso). Two MLPs can also be covalently linked to form an MLP dimer. An MLP can have modifying groups, other than masking agents, that enhance tissue targeting or facilitate in vivo circulation attached to either the amino terminal or carboxy terminal ends of the peptide. However, as used herein, MLP does not include chains or polymers containing more than two MLPs covalently linked to one another or to another polymer or scaffold.

[0063] In some embodiments, a melittin-like peptide (MLP) comprises an Apis florea (little or dwarf honey bee) melittin, Apis mellifera (westem or European or big honey bee) melittin, Apis dorsata (giant honey bee) melittin. Apis cerana (oriental honey bee) melittin or derivatives thereof (including amino acid substitutions). In some embodiments, MLP comprises the sequence: Xaa₁-Xaa₂-Xaa₃-Ala-Xaa₅-Leu-Xaa₇-Val-Leu-Xaa₁₀-Xaa₁₁-Xaa₁₂-Leu-Pro-Xaa₁₅-Leu-Xaa₁₇-Xaa₁₈-Trp-Xaa₂₀-Xaa₂₁-Xaa₂₂-Xaa₂₃-Xaa₂₄-Xaa₂₅-Xaa₂₆ wherein:
[0064] Xaa₁ is leucine, D-leucine, isoleucine, norleucine, tyrosine, tryptophan, valine, alanine, dimethylglycine, glycine, histidine, phenylalanine, or cysteine,
[0065] Xaa₂ is isoleucine, leucine, norleucine, or valine,
[0066] Xaa₃ is glycine, leucine, or valine,
[0067] Xaa₅ is isoleucine, leucine, norleucine, or valine,
[0068] Xaa₇ is lysine, serine, asparagine, alanine, arginine, or histidine,
[0069] Xaa₁₀ is alanine, threonine, or leucine,
[0070] Xaa₁₁ is threonine or cysteine,
[0071] Xaa₁₂ is glycine, leucine, or tryptophan,
[0072] Xaa₁₅ is threonine or alanine,
[0073] Xaa₁₇ is isoleucine, leucine, norleucine, or valine,
[0074] Xaa₁₈ is serine or cysteine,
[0075] Xaa₂₀ is isoleucine, leucine, norleucine, or valine,
[0076] Xaa₂₁ is lysine or alanine.
[0077] Xaa₂₂ is asparagine or arginine,
[0078] Xaa₂₃ is lysine or alanine,
[0079] Xaa₂₄ is arginine or lysine,
[0080] Xaa₂₅ is lysine, alanine, or glutamine,
[0081] Xaa₂₆ is optional and if present is glutamine, cysteine, glutamine-NH₂, or cysteine-NH₂; and,
[0082] and at least two of Xaa₂₁, Xaa₂₃, and Xaa₂₅ are lysine.

[0083] In some embodiments, MLP comprises the sequence: Xaa₁-Xaa₂-Xaa₃-Ala-Xaa₅-Leu-Xaa₇-Val-Leu-Xaa₁₀-Xaa₁₁-Xaau₁₂-Leu-Pro-Xaa₁₅-Leu-Xaa₁₇-Ser-Trp-Xaa₂₀-Lys-Xaa₂₂-Lys-Arg-Lys-Xaa₂₆, wherein:
[0084] Xaa₁ is leucine, D-leucine, norleucine, or tyrosine.
[0085] Xaa₂ is isoleucine, leucine, norleucine, or valine,
[0086] Xaa₃ is glycine, leucine, or valine.
[0087] Xaa₅ is isoleucine, valine, leucine, or norleucine,
[0088] Xaa₇ is lysine, serine, asparagine, alanine, arginine, or histidine,
[0089] Xaa₁₀ is alanine, threonine, or leucine.
[0090] Xaa₁₁ is threonine, or cysteine,
[0091] Xaa₁₂ is glycine, leucine, or tryptophan,
[0092] Xaa₁₅ is threonine, or alanine,
[0093] Xaa₁₇ is isoleucine, leucine, or norleucine.
[0094] Xaa₂₀ is isoleucine, leucine, or norleucine.
[0095] Xaa₂₂ is asparagine or arginine, and
[0096] Xaa₂₆ is glutamine or cysteine.

[0097] In some embodiments, MLP comprises the sequence: Xaa₁-Xaa₂-Gly-Ala-Xaa₅-Leu-Lys-Val-Leu-Ala-Xaa₁₁-Gly-Leu-Pro-Thr-Leu-Xaa₁₇-Ser-Trp-Xaa₂₀-Lys-Xaa₂₂-Lys-Arg-LVs-Xaa₂₆ wherein:
[0098] Xaa₁, Xaa₂, Xaa₅, Xaa₁₇ and Xaa₂₀ are independently isoleucine, leucine, or norleucine,
[0099] Xaa₁₁ is threonine or cysteine.
[0100] Xaa₂₂ is Asparagine or arginine, and
[0101] Xaa₂₆ is glutamine or cysteine.

TABLE 3
MLP amino acid sequences.

| SEQ ID | | |
|---|---|---|
| NO | MLP Sequence | Name |
| 644 | GIGAILKVLATGLPTLISWIKNKRKQ | Apis florea |
| 645 | AIGAILKVLATGLPTLISWIKNKRKQ | G1A |
| 646 | CIGAILKVLATGLPTLISWIKNKRKQ | G1C |
| 647 | FIGAILKVLATGLPTLISWIKNKRKQ | G1F |
| 648 | HIGAILKVLATGLPTLISWIKNKRKQ | G1H |
| 649 | IIGAILKVLATGLPTLISWIKNKRKQ | G1I |
| 650 | LIGAILKVLATGLPTLISWIKNKRKQ | G1L |
| 651 | NleIGAILKVLATGLPTLISWIKNKRKQ | G1Nle |
| 652 | VIGAILKVLATGLPTLISWIKNKRKQ | G1V |
| 653 | WIGAILKVLATGLPTLISWIKNKRKQ | G1W |
| 654 | YIGAILKVLATGLPTLISWIKNKRKQ | G1Y |
| 655 | GIGAILKVLACGLPTLISWIKNKRKQ | T11C dMel |
| 656 | GIGAILKVLATLLPTLISWIKNKRKQ | G12L |
| 657 | GIGAILKVLATWLPTLISWIKNKRKQ | Gl2W |
| 658 | GIGAILKVLATGLPTLISWIKTKRKQ | N22T |
| 659 | YIGAILNVLATGLPTLISWIKNKRKQ | G1Y, K7N |
| 660 | YIGAILAVLATGLPTLISWIKNKRKQ | G1Y, K7A |
| 661 | LIGAILSVLATGLPTLISWIKNKRKQ | G1L, K7S |
| 662 | LIGAILRVLATGLPTLISWIKNKRKQ | G1L, K7R |
| 663 | LIGAILHVLATGLPTLISWIKNKRKQ | G1L, K7H |
| 664 | LIGAILKVLACGLPTLISWIKNKRKQ | G1L, T11C |
| 665 | LIGAILKVLATLLPTLISWIKNKRKQ | G1L, G12L |
| 666 | YIGAILKVLATGLLTLISWIKNKRKQ | G1Y, P14L |
| 667 | LIGAILKVLATGLPCLISWIKNKRKQ | G1L, T15C |
| 668 | LIGAILKVLATGLPTLICWIKNKRKQ | G1L, S18C |
| 669 | YIGAILKVLATGLPTLISAIKNKRKQ | GlY, W19A |
| 670 | GIGAILKVLACGLPTLISWLKNKRKQ | T11C, I20L |
| 671 | YIGAILKVLATGLPTLISWIANKRKQ | G1Y, K21A |
| 672 | YIGAILKVLATGLPTLISWIKNARKQ | G1Y, K23A |
| 673 | LIGAILKVLATGLPTLISWIKNKAKQ | G1L, R24A |
| 674 | YIGAILKVLATGLPTLISWIKNKRAQ | G1Y, K25A |
| 675 | YIGAILKVLATGLPTLISWIKNKRKC | G1Y, Q26C |
| 676 | LLGAILKVLACGLPTLISWIKNKRKQ | G1L, I2L, T11C |
| 677 | LIGALLKVLACGLPTLISWIKNKRKQ | G1L, I5L, T11C |
| 678 | YIGAILAVLATGLPTLISWIANKRKQ | G1Y, K7A, K21A |
| 679 | YIGAILAVLATGLPTLISWIKNARKQ | G1Y, K7A, K23A |
| 680 | LIGAILKVLACGLPTLLSWIKNKRKQ | G1L, T11C, I17L |
| 681 | LIGAILKVLACGIPTLICWIKNKRKQ | G1L, T11C, S18C |
| 682 | GIGAILKVLACGLPGLIGWIKNKRKQ | T11G, T15G, S18G |
| 683 | GIGAILKVLACGLPALIAWIKNKRKQ | T11A, T15A, S18A |
| 684 | YIGAILAVLATGLPTLISWIANARKQ | G1Y, K7A, K21A, K23A |
| 685 | YIAAILKVLAAALATLISWIKNKRKQ | G1Y, G3A, T11A, G12A, P14A |
| 686 | LLGALLKVLATGLPTLLSWLKNKRKQ | G1L, I2L, 15L, I17L, I20L |
| 687 | LNleGANleLKVLATGLPTLNleSWNleKNKRKQ | G1L, I2Nle, I5Nle, I17Nle, I20Nle |
| 688 | LVGAVLKVLATGLPTLVSWVKNKRKQ | G1L, I2V, I5V, I17V, I20V |
| 689 | GLGALLKVLACGLPTLLSWLKNKRKQ | I2L, I5L, T11C, I17L, I20L |
| 690 | GNleGANleLKVLACGLPTLNleSWNleKNKRKQ | 12Nle, 15Nle, T11C, I17Nle, I20Nle |
| 691 | CEDDLLLGAILKVLATGLPTLISWIKNKRKQ | CEDDL-Mel G1L, I2L |
| 692 | CLVVLIVVAILKVLATGLPTLISWIKNKRKQ | CLVVL-Mel G1I, I2V, G3V |
| 693 | GIGAVLKVLITGLPALISWIKRKRQQ | Apis mellifera |
| 694 | CLIGAILKVLATGLPTLISWIKNKRKQ | C-Mel G1L |
| 695 | CNleIGAILKVLATGLPTLISWIKNKRKQ | C-Mel G1Nle |
| 696 | GLIGAILKVLATGLPTLISWIKNKRKQ | G-Mel G1L |
| 697 | LLIGAILKVLATGLPTLISWIKNKRKQ | L-Mel G1L |
| 698 | KLKLIGAILKVLATGLPTLISWIKNKRKQ | KLK-Mel G1L |
| 699 | KLKYIGAILKVLATGLPTLISWIKNKRKQ | KLK-Mel G1Y |
| 700 | CKLKLIGAILKVLATGLPTLISWIKNKRKQ | CKLK-Mel G1L |
| 701 | CKLKNleIGAILKVLATGLPTLISWIKNKRKQ | CKLK-Mel G1Nle |
| 702 | GKLKLIGAILKVLATGLPTLISWIKNKRKQ | GKLK-Mel GlL |
| 703 | CPANLIGAILKVLATGLPTLISWIKNKRKQ | CPAN-dMel G1L |
| 704 | DEPLRAIGAILKVLATGLPTLISWIKNKRKQ | DEPLR-Mel G1A |
| 705 | GIGAILKVLATGLPTLISWIKNKRKQC | Mel-Cys |
| 706 | LIGAILKVLATGLPTLISWIKNKRKQC | G1L Mel-Cys |
| 707 | NleIGAILKVLATGLPTLISWIKNKRKQC | G1Nle Mel-C |
| 708 | LIGAILKVLATGLPTLISWIKNKRKQKLKC | G1L Mel-KLKC |
| 709 | YIGAILKVLATGLPTLISWIKNKRKQPLGIAGQC | G1Y Mel-PLGIAGQC |
| 710 | LIGAILKVLATGLPTLISWIKNKRKQKKKKK | G1L Mel-KKKKK |
| 711 | YIGAILKVLATGLPTLISW1KNKRKQGFKGC | G1Y Mel-GFKGC |
| 712 | CFKLIGAILKVLATGLPTLISWIKNKRKQC | CFK-G1L Mel-C |
| 713 | FGAILKVLATGLPTLISWIKNKRKQ | G1F, I2Δ |
| 714 | LIGAILKVLATGLPTLISWIKNK | G1L Mel(1-23) |
| 715 | LIGAVLKVLTTGLPALISWIK | G1L, L5V, A10T, T15A Mel(1-21) |
| 716 | LIGAVLKVLTTGLPALISWIKGE | G1L, L5V, A10T, T15A, N22G, K23E |
| | | Mel(1-23) |
| 717 | QKRKNKIWSILTPLGTALVKLIAGIL | G1L retroMel |
| 718 | KLKQKRKNKIWSILTPLGTALVKLIAGIL | G1L retroMel-KLK |
| 719 | GIGAVLKVLTTGLPALISWISRKKRQQ | I5V, A10T, T15A, N22R, R24K, K25R Mel-Q |
| 720 | GIGARLKVLTTGLPRISWIKRKRQQ | I5R, A10T, T15R, L16Δ, N22R, K25Q |
| 721 | GIGAILKVLSTGLPALISWIKRKRQE | A10S, T15A, N22R, K25Q, Q26E |
| 722 | GIGAVLKVLTTGLPALIGWIKRKRQQ | I5V, A10T, T15A, S18G, N22R, K25Q |
| 723 | GIGAVLKVLATGLPALISWIKRKRQQ | I5V, T15A, N22R, K25Q |
| 724 | GIGAVLKVLSTGLPALISWIKRKRQQ | I5V, A105, T15A, N22R, K25Q |
| 725 | GIGAILRVLATGLPTLISWIKNKRKQ | K7R |
| 726 | GIGAILKVLATGLPTLISWIKRKRKQ | N22R |
| 727 | GIGAILKVLATGLPTLISWIKKKKQQ | N22K, R24K, K25Q |
| 728 | GIGAILKVLATGLPTLISWIKNKRKQGSKKKK | Mel-GSKKKK |
| 729 | KKGIGAILKVLATGLPTLISWIKNKRKQ | KK-Mel |
| 730 | GIGAILEVLATGLPTLISWIKNKRKQ | K7E Mel |
| 731 | GIGAVLKVLTTGLPALISWIKRKR | I5V, T15A, N22R, 25-26Δ |
| 732 | GIGAVLKVLTTGLPALISWIKR | I5V, T15A, N22R, 23-26Δ |
| 733 | CIGAVLKVUTTGLPALISWIKRKRQQ | G1C, I5V, A10T, T15A, N22R, K25Q |
| 734 | QQRKRKIWSILAPLGTTLVKLVAGIG | I5V, A10T, T15A, N22R retroMel |
| 735 | QQRKRKIWSILAPLGTTLVKLVAGIC | G1C, I5V, A10T, T15A, N22R retroMel |
| 736 | QQKKKKIWSILAPLGTTLVKLVAGIC | G1C, I5V, A10T, T15A, N22R, R24K |
| | | retroMel |
| 737 | QKRKNKIWSILTPLGTALVKLIAGIG | Q25K retro Mel |
| 738 | QQRKRKIWSILAALGTTLVKLVAGIC | G1C, I5V, A10T, P14A, T15A, N22R |
| | | retroMel |
| 739 | QKRKNKIWSILTPLGTALVKLIAGIG-NH₂ | Retroinverso (dMel) |

dMel = Melittin peptide having D-form amino acids

[0102] In some embodiments, the ASGPr ligand-containing masking agent has a neutral charge and comprises an ASGPr ligand linked to a disubstituted maleic anhydride amine-reactive group.

[0103] In some embodiments, the ASGPr ligand has affinity for the ASGPr greater than or equal to galactose (a galactose derivative). Galactose derivative include, but are not limited to: galactosamine. N-acetylgalactosamine, lactose, N-formylgalactosamine, N-acetyl-galactosamine, N-propionylgalactosamine, N-n-butanoylgalactosamine, and N-iso-butanoyl-galactosamine.

[0104] In some embodiments, a masking agent comprises a neutral hydrophilic disubstituted alkylmaleic anhydride having the structure represented by:

[chemical structure]

[0105] wherein in which R1 comprises an asialoglycoprotein receptor (ASGPr) ligand and alkyl can be, but is not limited to, methyl (—CH₃), ethyl (—CH₂CH₃), or propyl (—CH₂CH₂CH₃). An example of a substituted alkylmaleic anhydride consists of a 2-propionic-3-alkylmaleic anhydride derivative. A neutral hydrophilic 2-propionic-3-alkylmaleic anhydride derivative is formed by attachment of a neutral hydrophilic group to a 2-propionic-3-alkylmaleic anhydride through the 2-propionic-3-alkylmaleic anhydride γ-carboxyl group:

[chemical structure]

[0106] wherein R1 comprises a neutral ASGPr ligand and n=0 or 1. In some embodiments, the ASGPr ligand is linked to the anhydride via a short PEG linker.

[0107] In some embodiments, the galactose ligand is linked to the anhydride through a PEG linker as illustrated by the structure:

[chemical structure]

[0108] wherein n is an integer between 1 and 19.
[0109] Reaction of an amine with a cyclic anhydride to form an amide acid.

[chemical structure]

[0110] Cleavage of the amide acid to form an amine and an anhydride is pH-dependent and is greatly accelerated at acidic pH.

[0111] The membrane active polyamine can be conjugated to masking agents in the presence of an excess of masking agents. The excess masking agent may be removed from the conjugated delivery peptide prior to administration of the delivery peptide.

### ASGPr Ligand

[0112] Targeting moieties or groups enhance the pharmacokinetic or biodistribution properties of a conjugate to which they are attached to improve cell-specific distribution and cell-specific uptake of the conjugate. Galactose derivatives have been used to target molecules to hepatocytes in vivo through their binding to the asialoglycoprotein receptor (ASGPr) expressed on the surface of hepatocytes. As used herein, an ASGPr ligand comprises a galactose derivative having affinity for the ASGPr equal to or greater than that of galactose. Binding of ASGPr ligands to the ASGPr(s) facilitates cell-specific targeting to hepatocytes and endocytosis of the molecule into hepatocytes. ASGPr ligands may be selected from the group comprising: lactose, galactose, N-acetylgalactosamine (GaJNAc), galactosamine, N-formylgalactosamine, N-acetyl-galactosamine, N-propionylgalactosamine. N-n-butanoylgalactosamine, and N-iso-butanoyl-galactosamine (Iobst, S. T. and Drickamer, K. J.B.C. 1996, 271, 6686). ASGPr ligands can be monomeric (e.g., having a single galactosamine) or multimeric (e.g., having multiple galactosamines). In some embodiments, the MLP is reversibly masked by attachment of ASGPr ligand masking agents to ≥80% or ≥90% of primary amines on the peptide.

### RNAi Trigger-Hydrophobic Group Conjugate

[0113] We have found that conjugation of an HBV RNAi trigger to a hydrophobic group, such as a cholesterol or cholesteryl group, and co-administration of the RNAi trigger conjugate with an MLP delivery peptide provides for efficient, functional delivery of the HBV RNAi trigger to liver cells, particularly hepatocytes, in vivo. In some embodiments, an HBV RNAi trigger is covalently conjugated to a hydrophobic group. A trigger can be synthesized or modified such that it contains a reactive group A. The targeting group can also be synthesized or modified such that it contains a reactive group B. Reactive groups A and B are chosen such that they can be linked via a covalent linkage using methods known in the art. The hydrophobic group may be linked to the 3′ or the 5′ end of an HBV RNAi trigger. In some embodiments, a hydrophobic group is linked to either the sense strand or the antisense strand of the RNAi trigger. In some embodiments, a hydrophobic group is linked to the sense strand of the RNAi trigger.

[0114] In some embodiments, hydrophobic groups useful as polynucleotide targeting moieties may be selected from the group consisting of: alkyl group, alkenyl group, alkynyl group, aryl group, aralkyl group, aralkenyl group, and aralkynyl group, each of which may be linear, branched, or cyclic, cholesterol, cholesterol derivative, sterol, steroid, and steroid derivative. Hydrophobic targeting moieties are typically hydrocarbons, containing only carbon and hydrogen atoms. In some embodiments, the hydrophobic group can be, but is not limited to, cholesterol, dicholesterol, tocopherol, ditocopherol, didecyl, didodecyl, dioctadecyl, didodecyl, dioctadecyl, isoprenoid, and choleamide. Attachment of a hydrophobic targeting group to an HBV RNAi trigger does not provide efficient functional in vivo delivery of the HBV RNAi trigger in the absence of co-administration of the delivery peptide. While siRNA-cholesterol conjugates have been reported by others to deliver siRNA (siRNA-cholesterol) to liver cells in vivo, in the absence of any additional delivery vehicle, high concentrations of siRNA are required and delivery efficacy is poor. When combined with the delivery peptides described herein, delivery of the RNAi trigger is greatly improved. By providing the HBV RNAi trigger-cholesterol and a delivery peptide, efficacy of HBV RNAi trigger is increased about 100 fold. In some embodiments, a targeting group is linked to either the sense strand or the antisense strand of the RNAi trigger. Substitutions or heteroatoms which maintain hydrophobicity, for example fluorine, may be permitted. The hydrophobic targeting group may be attached to the 3′ or 5′ end of the HBV RNAi trigger using methods known in the art. For HBV RNAi triggers having 2 strands, the hydrophobic group may be attached to either strand.

[0115] Hydrophobic group indicates in qualitative terms that the chemical moiety is water-avoiding. Typically, such chemical group is not water soluble, and tends not to form hydrogen bonds. Hydrophobic groups dissolve in fats, oils, lipids, and non-polar solvents and have little to no capacity to form hydrogen bonds. Hydrocarbons containing two (2) or more carbon atoms, certain substituted hydrocarbons, cholesterol, and cholesterol derivatives are examples of hydrophobic groups and compounds. Hydrophobic groups are typically hydrocarbons, containing only carbon and hydrogen atoms. In some embodiments, non-polar substitutions or non-polar heteroatoms which maintain hydrophobicity, and include, for example fluorine, are permitted. The term includes aliphatic groups, aromatic groups, acyl groups, alkyl groups, alkenyl groups, alkynyl groups, aryl groups, aralkyl groups, aralkenyl groups, and aralkynyl groups, each of which may be linear, branched, or cyclic. The term hydrophobic group also includes: sterols, steroids, cholesterol, and steroid and cholesterol derivatives. As used herein, cholesteryl group means a compound comprising cholesterol or cholesterol derivative(s).

[0116] As used herein, membrane active peptides are surface active, amphipathic peptides that are able to induce one or more of the following effects upon a biological membrane: an alteration or disruption of the membrane that allows non-membrane permeable molecules to enter a cell or cross the membrane, pore formation in the membrane, fission of membranes, or disruption or dissolving of the membrane. As used herein, a membrane, or cell membrane, comprises a lipid bilayer. The alteration or disruption of the membrane can be functionally defined by the peptide's activity in at least one the following assays: red blood cell lysis (hemolysis), liposome leakage, liposome fusion, cell fusion, cell lysis, and endosomal release. Membrane active peptides that can cause lysis of cell membranes are also termed membrane lytic peptides. Peptides that preferentially cause disruption of endosomes or lysosomes over plasma membranes are considered endosomolytic. The effect of membrane active peptides on a cell membrane may be transient. Membrane active peptides possess affinity for the membrane and cause a denaturation or deformation of bilayer structures.

[0117] The term polynucleotide, or nucleic acid or polynucleic acid, is a term of art that refers to a polymer containing at least two nucleotides. Nucleotides are the monomeric units of polynucleotide polymers. Polynucleotides with less than 120 monomeric units are often called oligonucleotides. Natural nucleic acids have a deoxyribose- or ribose-phosphate backbone. A non-natural or synthetic polynucleotide is a polynucleotide that is polymerized in vitro or in a cell free system and contains the same or similar bases but may contain a backbone of a type other than the natural ribose or deoxyribose-phosphate backbone. Polynucleotides can be synthesized using any known technique in the art. Polynucleotide backbones known in the art include: PNAs (peptide nucleic acids), phosphorothioates, phosphorodiamidates, morpholinos, and other variants of the phosphate backbone of native nucleic acids. Bases include purines and pyrimidines, which further include the natural compounds adenine, thymine, guanine, cytosine, uracil, inosine, and natural analogs. Synthetic derivatives of purines and pyrimidines include, but are not limited to, modifications which place new reactive groups on the nucleotide such as, but not limited to, amines, alcohols, thiols, carboxylates, and alkylhalides. The term base encompasses any of the known base analogs of DNA and RNA. A polynucleotide may contain ribonucleotides, deoxyribonucleotides, synthetic nucleotides, or any suitable combination. Polynucleotides may be polymerized in vitro, they may be recombinant, contain chimeric sequences, or derivatives of these groups. A polynucleotide may include a terminal cap group at the 5′-end, the 3′-end, or both the 5′ and 3′ ends. The cap group can be, but is not limited to, an inverted deoxy abasic group, an inverted deoxy thymidine, a thymidine, or 3′ glyceryl modification.

[0118] An RNA interference (RNAi) trigger is a molecule capable of inducing RNA interference through interaction with the RNA interference pathway machinery of mammalian cells to degrade or inhibit translation of messenger RNA (mRNA) transcripts of a transgene in a sequence specific manner. Two primary HBV RNAi triggers are small (or short) interfering RNAs (siRNAs) and micro RNAs (miRNAs). HBV RNAi triggers may be selected from the group comprising: siRNA, microRNA, double-strand RNA (dsRNA), short hairpin RNA (shRNA), and expression cassettes encoding RNA capable of inducing RNA interference.

[0119] RNAi triggers comprise a double stranded structure typically containing 15-50 base pairs. In some embodiments, RNAi triggers comprise a double strand structure having 17-26 base pairs and having a nucleotide sequence identical (perfectly complementary) or nearly identical (partially complementary) to a coding sequence in an expressed target gene or RNA within the cell. An RNAi trigger may have dinucleotide 3′ overhangs. An RNAi trigger may be composed of two annealed polynucleotides or a single polynucleotide that forms a hairpin structure. An RNAi trigger comprises a sense region and an antisense region. In some embodiments, an RNAi trigger is assembled from two oligonucleotide fragments wherein one fragment comprises the nucleotide sequence of the antisense strand of the RNAi trigger and a second fragment comprises nucleotide sequence of the sense region of the RNAi trigger. In some embodiments, the sense strand is connected to the antisense strand via a linker molecule, such as a polynucleotide linker or a non-nucleotide linker. MicroRNAs (miRNAs) are small noncoding RNA gene products about 22 nucleotides long that direct destruction or translational repression of their mRNA targets. If the complementarity between the miRNA and the target mRNA is partial, translation of the target mRNA is repressed. If complementarity is extensive, the target mRNA is cleaved. For miRNAs, the complex binds to target sites usually located in the 3′ UTR of mRNAs that typically share only partial homology with the miRNA. A “seed region”—a stretch of about seven (7) consecutive nucleotides on the 5′ end of the miRNA that forms perfect base pairing with its target—plays a key role in miRNA specificity. Binding of the RISC/miRNA complex to the mRNA can lead to either the repression of protein translation or cleavage and degradation of the mRNA. Recent data indicate that mRNA cleavage happens preferentially if there is perfect homology along the whole length of the miRNA and its target instead of showing perfect base-pairing only in the seed region (Pillai et al. 2007).

[0120] An HBV RNAi trigger can be chemically modified. Non-limiting examples of such chemical modifications include: phosphorothioate intemucleotide linkages, 2′-O-methyl ribonucleotides, 2′-deoxy-2′-fluoro ribonucleotides, 2′-deoxyribonucleotides, “universal base” nucleotides, 5-C-methyl nucleotides, and inverted deoxyabasic residue incorporation. These chemical modifications, when used in various polynucleotide constructs, are shown to preserve polynucleotide activity in cells while at the same time increasing the serum stability of these compounds. Chemically modified RNAi trigger can also minimize the possibility of activating interferon activity in humans.

[0121] The term complementarity refers to the ability of a polynucleotide to form hydrogen bond(s) with another polynucleotide sequence by either traditional Watson-Crick or other non-traditional types. In reference to the polynucleotide molecules, the binding free energy for a polynucleotide molecule with its target (effector binding site) or complementary sequence is sufficient to allow the relevant function of the polynucleotide to proceed, e.g., enzymatic mRNA cleavage or translation inhibition. Determination of binding free energies for nucleic acid molecules is well known in the art (Frier et al. 1986, Turner et al. 1987). A percent complementarity indicates the percentage of bases, in a contiguous strand, in a first polynucleotide molecule which can form hydrogen bonds (e.g., Watson-Crick base pairing) with a second polynucleotide sequence (e.g., 5, 6, 7, 8, 9, 10 out of 10 being 50%, 60%, 70%, 80%, 90%, and 100% complementary). Perfectly complementary means that all the bases in a contiguous strand of a polynucleotide sequence will hydrogen bond with the same number of contiguous bases in a second polynucleotide sequence.

[0122] By inhibit, down-regulate, or knockdown gene expression, it is meant that the expression of the gene, as measured by the level of RNA transcribed from the gene or the level of polypeptide, protein or protein subunit translated from the RNA, is reduced below that observed in the absence of the blocking polynucleotide-conjugates. In some embodiments, inhibition, down-regulation, or knockdown of gene expression, with a polynucleotide delivered by the described compositions, is below the level observed in the presence of a control inactive nucleic acid, a nucleic acid with scrambled sequence or with inactivating mismatches, or in absence of conjugation of the polynucleotide to the masked polymer.

### In Vivo Administration

[0123] In pharmacology and toxicology, a route of administration is the path by which a drug, fluid, poison, or other substance is brought into contact with the body. In general, methods of administering drugs and nucleic acids for treatment of a mammal are well known in the art and can be applied to administration of the described compositions. In some embodiments, the described compositions can be administered via any suitable route, such as, but not limited to, parenterally, in a preparation appropriately tailored to that route. Thus, in some embodiments, the described compositions can be administered by injection, for example, intravenously, intramuscularly, intracutaneously, subcutaneously, or intraperitoneally. In some embodiments, pharmaceutical compositions comprising a pharmaceutically acceptable carrier or excipient are described.

[0124] Parenteral routes of administration include intravascular (intravenous, intraarterial), intramuscular, intraparenchymal, intradermal, subdermal, subcutaneous, intratumor, intraperitoneal, intrathecal, subdural, epidural, and intralymphatic injections that use a syringe and a needle or catheter. Intravascular herein means within a tubular structure called a vessel that is connected to a tissue or organ within the body. Within the cavity of the tubular structure, a bodily fluid flows to or from the body part. Examples of bodily fluid include blood, cerebrospinal fluid (CSF), lymphatic fluid, or bile. Examples of vessels include arteries, arterioles, capillaries, venules, sinusoids, veins, lymphatics, bile ducts, and ducts of the salivary or other exocrine glands. The intravascular route includes delivery through the blood vessels such as an artery or a vein. The blood circulatory system provides systemic spread of the pharmaceutical.

[0125] In some embodiments, an HBV RNAi trigger-targeting group conjugate is co-administered with a delivery peptide. By co-administered it is meant that the HBV RNAi trigger and the delivery peptide are administered to the mammal such that both are present in the mammal at the same time. The HBV RNAi trigger-targeting group conjugate and the delivery peptide may be administered simultaneously or they may be delivered sequentially. For simultaneous administration, they may be mixed prior to administration. For sequential administration, either the HBV RNAi trigger-targeting group conjugate or the delivery peptide may be administered first.

### Pharmaceutical Compositions

[0126] In some embodiments, at least one of the described HBV RNAi triggers is used in the preparation of a pharmaceutical composition (i.e., medicament) for treatment of a subject that would benefit from reduction or inhibition in HBV expression. These pharmaceutical compositions are useful in the inhibition of the expression of the HBV gene in a cell, a tissue, or an organism. In some embodiments, the described pharmaceutical compositions are used to treat a subject having a disease or disorder that would benefit from reduction or inhibition in HBV expression.

[0127] As used herein, a pharmaceutical composition or medicament comprises a pharmacologically effective amount of at least one of the described HBV RNAi triggers and one or more pharmaceutically acceptable excipients Pharmaceutically acceptable excipients (excipients) are substances other than the Active Pharmaceutical ingredient (API, therapeutic product, e.g., RNAi trigger) that have been appropriately evaluated for safety and are intentionally included in the drug delivery system. Excipients do not exert or are not intended to exert a therapeutic effect at the intended dosage. Excipients may act to a) aid in processing of the drug delivery system during manufacture, b) protect, support or enhance stability, bioavailability or patient acceptability of the API, c) assist in product identification, and/or d) enhance any other attribute of the overall safety, effectiveness, of delivery of the API during storage or use. A pharmaceutically acceptable excipient may or may not be an inert substance.

[0128] Excipients include, but are not limited to: absorption enhancers, anti-adherents, anti-foaming agents, anti-oxidants, binders, binders, buffering agents, carriers, coating agents, colors, delivery enhancers, dextran, dextrose, diluents, disintegrants, emulsifiers, extenders, fillers, flavors, glidants, humectants, lubricants, oils, polymers, preservatives, saline, salts, solvents, sugars, suspending agents, sustained release matrices, sweeteners, thickening agents, tonicity agents, vehicles, water-repelling agents, and wetting agents.

[0129] A pharmaceutical composition can contain other additional components commonly found in pharmaceutical compositions. Such additional components include, but are not limited to: anti-pruritics, astringents, local anesthetics, or anti-inflammatory agents (e.g., antihistamine, diphenhydramine, etc.). It is also envisioned that cells, tissues or isolated organs that express or comprise the herein defined RNAi triggers may be used as “pharmaceutical compositions” As used herein, “pharmacologically effective amount,” “therapeutically effective amount,” or simply “effective amount” refers to that amount of an RNAi trigger to produce the intended pharmacological, therapeutic or preventive result.

[0130] In some embodiments, a described HBV RNAi trigger is combined one or more additional therapeutics or treatments including, but not limited to: a second HBV RNAi trigger or other RNAi agent, a small molecule drug, an antibody, an antibody fragment, and/or a vaccine.

[0131] The described HBV RNAi triggers and pharmaceutical compositions comprising HBV RNAi triggers disclosed herein may be packaged or included in a kit, container, pack, or dispenser. The HBV RNAi triggers and pharmaceutical compositions comprising said HBV RNAi triggers may be packaged in pre-filled syringes or vials.

### Method of Treatment

[0132] In some embodiments, the HBV RNAi triggers described herein are used to treat a subject infected with HBV. In some embodiments, the described HBV RNAi triggers are used to treat at least one symptom in a subject having a HBV infection. The subject is administered a therapeutically effective amount of any one or more of the described RNAi triggers.

[0133] In some embodiments, the HBV RNAi triggers are used to treat or manage a clinical presentation wherein a subject infected with HBV. The subject is administered a therapeutically or effective amount of one or more of the HBV RNAi triggers or HBV RNAi trigger-containing compositions described herein. In some embodiments, the method comprises administering a composition comprising an HBV RNAi trigger molecule described herein to a subject to be treated.

[0134] As used herein, the terms “silence,” “reduce,” “inhibit,” “down-regulate,” or “knockdown gene expression,” when referring to an HBV gene, mean that the expression of the gene, as measured by the level of RNA transcribed from the gene or the level of polypeptide, protein, or protein subunit translated from the mRNA in a cell, group of cells, or tissue, in which the HBV gene is transcribed, is reduced when the cell, group of cells, or tissue, is treated with the described HBV RNAi triggers as compared to a second cell, group of cells, or tissue that has or has not been so treated or compared to the same cell, group of cells, or tissue, prior to administration of the HBV RNAi trigger.

[0135] In some embodiments, the gene expression level and/or mRNA level of an HBV gene in a subject to whom a described HBV RNAi trigger is administered is reduced by at least about 5%, 10%, 15%, 20%, 25%, 30%, 35%, 40%, 45%, 50%, 55%, 60%, 65%, 70%, 75%, 80%, 85%, 90%, 95%, or 98% relative to the subject prior to being administered the HBV RNAi trigger or to a subject not receiving the HBV RNAi trigger. The gene expression level and/or mRNA level in the subject may be reduced in a cell, group of cells, and/or tissue of the subject.

[0136] In some embodiments, the protein level of HBV in a subject to whom a described HBV RNAi trigger has been administered is reduced by at least about 5%, 10%, 15%, 20%, 25%, 30%, 35%, 40%, 45%, 50%, 55%, 60%, 65%, 70%, 75%, 80%, 85%, 90%, 95%, or 98% relative to the subject prior to being administered the HBV RNAi trigger or to a subject not receiving the HBV RNAi trigger. The protein level in the subject may be reduced in a cell, group of cells, tissue, blood, and/or other fluid of the subject. A reduction in gene expression, mRNA, or protein levels can be assessed by any methods known in the art. Reduction or decrease in HBV mRNA level and/or protein level are collectively referred to herein as a reduction or decrease in HBV or inhibiting or reducing the expression of HBV.

[0137] “Introducing into a cell”, when referring to an RNAi trigger, means functionally delivering the RNAi trigger into a cell. By functional delivery, it is meant that the RNAi trigger is delivered to the cell and has the expected biological activity. (e.g., sequence-specific inhibition of gene expression).

[0138] The route of administration is the path by which an RNAi trigger is brought into contact with the body. In general, methods of administering drugs and nucleic acids for treatment of a subject are well known in the art and can be applied to administration of the compositions described herein. The compounds described herein can be administered via any suitable route in a preparation appropriately tailored to the particular route. Thus, the compounds described herein can be administered by injection, for example, intravenously, intramuscularly, intracutaneously, subcutaneously, or intraperitoneally.

### EXAMPLES

### Example 1. MUP Synthesis

[0139] All MLPs were made using peptide synthesis techniques standard in the art. Suitable MLPs can be all L-form amino acids, all D-form amino acids (inverso). Independently of L or D form, the MLP sequence can be reversed (retro).

### Example 2. Amino Terminal Modification of MLPs

[0140] Solutions of CKLK-MLP (20 mg/ml). TCEP-HCl (28.7 mg/ml, 100 mM), and MES-Na (21.7 mg/ml, 100 mM) were prepared in dH₂O. In a 20 ml scintillation vial, CKLK-MLP (0.030 mmol, 5 ml) was reacted with 1.7 molar equivalents TCEP-HCl (0.051 mmol, 0.51 ml) and left to stir at room temperature for 30 min. MES-Na (2 ml) and Water (1.88 ml) were then added in amounts to yield final concentrations of 10 mg/ml MLP and 20 mM MES-Na. The pH was checked and adjusted to pH 6.5-7. A solution of NAG-PEG₂-Br (100 mg/ml) was prepared in dH₂O. NAG-PEG₂-Br (4.75 eq, 0.142 mmol, 0.61 ml) was added, and the solution was left to stir at room temperature for 48 h.

[0141] Alternatively, in a 20 ml scintillation vial, Cys-MLP (0.006 mmol, 1 ml) was reacted with 1.7 molar equivalents TCEP-HCl (0.010 mmol, 100 μl) and left to stir at room temperature for 30 min. MES-Na (400 μl) and water (390 μl) were added in amounts to yield final concentrations of 10 mg/mi MLP and 20 mM MES-Na. The pH was checked and adjusted to pH 6.5-7. A solution of NAG-PEGu-Maleimide (100 mg/ml) was prepared in dH₂O. NAG-PEG₈-Maleimide (2 eq, 0.012 mmol, 110 μl) was added, and the solution was left to stir at room temperature for 48 h.

[0142] Samples were purified on a Luna 10μ C18 IMA 21.2×250 mm column. Buffer A: H₂O 0.1% TFA and Buffer B: MeCN, 10% Isopropyl Alcohol, 0.1% TFA. Flow rate of 15 ml/min, 35% A to 62.5% B in 20 min.

[0143] Other amino terminal modifications were made using similar means. Carboxyl terminal modifications were made substituting MLPs having carboxyl terminal cysteines for MLPs having amino terminal cysteines.

[0144] Compounds used to modified Cys-MLP or MLP-Cys:

[chemical structure]

[0145] n is an integer from 1 to 120 (PEG molecular weight up to about 5 kDa)

[chemical structure]

[0146] Peptides having acetyl, dimethyl, stearoyl, myristoyl, and PEG amino or carboxyl terminal modifications, but not terminal cysteine residues, were generated on resin during peptide synthesis using methods typical in the art.

### Example 3. Masking Agents Synthesis

[0147] A. pH labile masking agents: Steric stabilizer CDM-PEG and targeting group CDM-NAG (N-acetyl galactosamine) syntheses. To a solution of CDM (300 mg, 0.16 mmol) in 50 mL methylene chloride was added oxalyl chloride (2 g, 10 wt. eq.) and dimethylformamide (5 μl). The reaction was allowed to proceed overnight, after which the excess oxalyl chloride and methylene chloride were removed by rotary evaporation to yield the CDM acid chloride. The acid chloride was dissolved in 1 mL of methylene chloride. To this solution was added 1.1 molar equivalents polyethylene glycol monomethyl ether (MW average 550) for CDM-PEG or (aminoethoxy)ethoxy-2-(acetylamino)-2-deoxy-β-D-galactopyranoside (i.e. amino bisethoxyl-ethyl NAG) for CDM-NAG, and pyridine (200 μl, 1.5 eq) in 10 mL of methylene chloride. The solution was then stirred 1.5 h. The solvent was then removed and the resulting solid was dissolved into 5 mL of water and purified using reverse-phase HPLC using a 0.1% TFA water/acetonitrile gradient.

[chemical structure]

[0148] R1 comprises a neutral ASGPr ligand. In some embodiments, the Masking Agent in uncharged.

[chemical structure]

[0149] R is a methyl or ethyl, and n is an integer from 2 to 100. In some embodiments, the PEG contains from 5 to 20 ethylene units (n is an integer from 5 to 20). In some embodiments, the PEG contains 10-14 ethylene units (n is an integer from 10 to 14). The PEG may be of variable length and have a mean length of 5-20 or 10-14 ethylene units. Alternatively, the PEG may be monodisrse uniform or discrete; having, for example, exactly 11 or 13 ethylene units.

[chemical structure]

[0150] n is an integer from 1 to 10. As shown above, a PEG spacer may be positioned between the anhydride group and the ASGPr ligand. In some embodiments, a PEG spacer contains 1-10 ethylene units.

[0151] Alternatively an alkyl spacer may be used between the anhydride and the N-acetylgalactosamine.

[chemical structure]

[0152] n is a integer from 0 to 6.

[0153] Other spacers or linkers may be used bet between the anhydride and the N-acetyl-galactosamine. In some embodiments, a hydrophilic spacer or linker is used. In some embodiments, a neutral spacer or linker is used.

### Example 4. Reversible Modification/Masking of MLP

[0154] A. Modification with maleic anhydride-based masking agents. Prior to modification, 5×mg of disubstituted maleic anhydride masking agent (e.g. CDM-NAG) was lyophilized from a 0.1% aqueous solution of glacial acetic acid. To the dried disubstituted maleic anhydride masking agent was added a solution of × mg MLP in 0.2×mL of isotonic glucose and 10×mg of HEPES free base. Following complete dissolution of anhydride, the solution was incubated for at least 30 min at RT prior to animal administration. Reaction of disubstituted maleic anhydride masking agent with the peptide yielded.

[chemical structure]

[0155] wherein R is MLP and R1 comprises a ASGPr ligand (e.g. NAG). The anhydride carboxyl produced in the reaction between the anhydride and the polymer amine exhibits ˜ 1/20^{th} of the expected charge (Rozema et al. Bioconjugate Chemistry 2003). Therefore, the membrane active polymer is effectively neutralized rather than being converted to a highly negatively charged polyanion.

[0156] In some embodiments, the masked MLP (MLP-(CDM-NAG)) was in a solution containing 125 mg MLP, 500 mg dextran 1K, 3.18 mg sodium carbonate, 588 mg sodium bicarbonate in 5 ml water. In some embodiments, the MLP-(CDM-NAG) was lyophilized.

[0157] B. Modification with protease cleavable masking agents. 1×mg of peptide and 10×mg HEPES base at 1-10 mg/mL peptide was masked by addition of 2-6×mg of amine-reactive p-nitrophenyl carbonate or N-hydroxysuccinimide carbonate derivatives of the NAG-containing protease cleavable substrate. The solution was then incubated at least 1 h at room temperature (RT) before injection into animals.

### Example 5. HBV RNAi Trigger-Targeting Molecule Conjugates

[0158] (I) RNAi trigger conjugation to alkyl groups. A 5′-C10-NHS ester modified sense strand of RNAi trigger (NHSC10-RNAi trigger, or COC9-RNAi trigger) was prepared employing 5′-Carboxy-Modifier C10 amidite from Glen Research (Virginia, USA). The activated RNA, still attached to the solid support was used for conjugation with lipophilic amines listed in Table 1 below. 100 mg of the sense strand CPG (loading 60 μmol/g, 0.6 μmol RNA) were mixed with 0.25 mmol of the corresponding amine obtained from, Sigma Aldrich Chemie GmbH (Taufkirchen, Germany) or Fluka (Sigma-Aldrich, Buchs, Switzerland).

TABLE 4
Lipophilic amines used in forming hydrophobic
group-RNAi trigger conjugates

| Nr | Lipophilic Amine | mg | mmol | solvent |
|---|---|---|---|---|
| 2 | N-Hexylamine | 25 | 0.25 | 1 mL CH₂Cl₂ |
| 3 | Dodecylamine | 50 | 0.25 | 0.55 mL CH₃CN, |
| | | | | 0.45 mL CH₂Cl₂ |
| 4 | Octadecylamine | 67 | 0.25 | 1 mL CH₂Cl₂ |
| 5 | Didecylamine | 74 | 0.25 | 1 mL CH₂Cl₂ |
| 6 | Didodecylamine | 88 | 0.25 | 1 mL CH₂Cl₂ |
| 7 | Dioctadecylamine | 67 | 0.12 | 0.45 mL CH₂Cl₂, |
| | | | | 0.45 mL Cyclohexan |

[0159] The mixture was shaken for 18 h at 40° C. The RNA was cleaved from the solid support and deprotected with an aqueous ammonium hydroxide solution (NH₃, 33%) at 45° C. overnight. The 2′-protecting group was removed with TEA×3HF at 65° C. for 3.5 h. The crude oligoribonucleotides were purified by RP-HPLC (Resource RPC 3 ml, buffer: A: 100 mM TEAA in water, B: 100 mM TEAA in 95% CH₃CN, gradient: 3% B to 70% B in 15 CV, except for Nr 7: gradient from 3% B to 100% B in 15 CV).

[0160] To generate RNAi trigger from RNA single strands, equimolar amounts of complementary sense and antisense strands were mixed in annealing buffer (20 mM sodium phosphate, pH 6.8; 100 mM sodium chloride), heated at 80° C. for 3 min, and cooled to RT over a period of 3-4 h. The RNAi triggers, which are directed against factor VII mRNA were characterized by gel electrophoresis.

[0161] (2) HBVRNAi trigger conjugation to cholesterol—HBV RNAi trigger-cholesterol conjugates were synthesized using methods standard in the art. Cholesterol can be attached to the 5′ or 3′ termini of the sense or antisense strand of the trigger. In some embodiments, attachment is to the 5′ end of the sense strand of the trigger. Trigger-Cholesterol can also be made post trigger synthesis using RNA strands containing a reactive group (e.g. thiol, amine, or carboxyl) using methods standard in the art.

### Example 6. Administration of HBV RNAi Triggers In Vivo, and Delivery to Hepatoeytes

[0162] RNAi triggers and masked MLPs were synthesized as described above. Six to eight week old mice (strain C57BL/6 or ICR, ˜18-20 g each) were obtained from Harlan Sprague Dawley (Indianapolis IN). Mice were housed at least 2 days prior to injection. Feeding was performed ad libitum with Harlan Teklad Rodent Diet (Harlan, Madison WI). Mice were injected with 0.2 mL solution of delivery peptide and 0.2 mL RNAi trigger conjugates into the tail vein. For simultaneous injection of delivery peptide and RNAi trigger, the RNAi trigger-conjugate was added to modified peptide prior to injection and the entire amount was injected. The composition was soluble and nonaggregating in physiological conditions. Solutions were injected by infusion into the tail vein. Injection into other vessels, e.g. retro-orbital injection, are predicted to be equally effective.

[0163] MLPs having the indicated sequence were reversibly modified with CDM-NAG (5×) as described above. The indicated amount of MLP was then co-injected with the indicated amount of ApoB RNAi trigger-cholesterol conjugate. Effect on ApoB levels were determined as described above.

TABLE 5
Inhibition of ApoB activity in normal liver cells in mice
treated with ApoB-RNAi trigger cholesterol conjugate
and the indicated CDM-NAG reversibly inhibited MLP.

| | | μg ApoB | percent |
|---|---|---|---|
| MLP | μg | RNAi | ApoB |
| SEQ ID NO | peptide | Trigger | knockdown |
| 645 | 100 | 100 | 88 |
| 646 | 100 | 100 | 37 |
| 647 | 100 | 50 | 94 |
| 648 | 400 | 100 | 78 |
| 649 | 50 | 100 | 34 |
| 650 (D-form) | 50 | 100 | 93 |
| 651 | 100 | 100 | 96 |
| 652 | 100 | 100 | 91 |
| 653 | 200 | 200 | 96 |
| 654 | 100 | 50 | 95 |
| 654 (C-term NH₂) | 200 | 200 | 94 |
| 656 | 80 | 100 | 58 |
| 657 | 80 | 100 | 51 |
| 658 | 50 | 100 | 34 |
| 659 | 80 | 100 | 32 |
| 660 | 400 | 100 | 83 |
| 661 | 100 | 100 | 89 |
| 662 | 100 | 100 | 92 |
| 663 | 100 | 100 | 97 |
| 664 | 100 | 50 | 81 |
| 665 | 400 | 100 | 93 |
| 667 | 100 | 100 | 95 |
| 668 | 100 | 100 | 93 |
| 671 | 100 | 100 | 95 |
| 672 | 100 | 100 | 42 |
| 673 | 100 | 100 | 87 |
| 674 | 100 | 100 | 77 |
| 675 | 100 | 100 | 93 |
| 678 | 100 | 100 | 14 |
| 681 | 100 | 100 | 88 |
| 682 | 50 | 100 | 32 |
| 683 | 50 | 100 | 38 |
| 686 | 400 | 100 | 96 |
| 687 | 100 | 100 | 99 |
| 688 | 100 | 100 | 24 |
| 689 | 100 | 100 | 87 |
| 690 | 100 | 100 | 78 |
| 693 | 400 | 100 | 72 |
| 694 | 100 | 100 | 89 |
| 695 | 100 | 100 | 84 |
| 696 | 100 | 100 | 91 |
| 699 | 300 | 100 | 72 |
| 700 | 150 | 100 | 91 |
| 701 | 100 | 200 | 90 |
| 702 | 50 | 100 | 85 |
| 705 | 400 | 100 | 83 |
| 706 | 400 | 100 | 82 |
| 707 | 400 | 50 | 89 |
| 708 | 100 | 100 | 97 |
| 709 | 100 | 100 | 79 |
| 710 | 400 | 100 | 96 |
| 711 | 400 | 100 | 96 |
| 712 | 100 | 100 | 79 |
| 714 | 400 | 100 | 69 |
| 715 | 400 | 100 | 69 |
| 716 | 400 | 100 | 92 |
| 717 | 400 | 100 | 56 |
| 718 | 400 | 100 | 50 |
| 733 | 400 | 200 | 85 |
| 735 | 400 | 200 | 55 |

### Example 7. Reduction in Hepatitis B Virus (HBV) In Vivo Following Delivery of HBV RNAi Triggers with MLP Delivery Peptide

[0164] A) pHBVmodel mice: At day −42.6 to 8 week old female NOD.CB17-Prkdscid/NcrCrl (NOD-SCID) mice were transiently transfected in vivo with MC-HBV1.3 by hydrodynamic tail vein injection (Yang P L et al. “Hydrodynamic injection of viral DNA: a mouse model of acute hepatitis B virus infection.” PNAS USA 2002 Vol. 99: p. 13825-13830). MC-HBV1.3 is a plasmid-derived minicircle that contains the same terminally redundant human hepatitis B virus sequence HBV1.3 as in the HBV1.3.32 transgenic mice (GenBank accession #V01460) (Guidotti L G et al “High-level hepatitis B virus replication in transgenic mice. J Virol 1995 Vol. 69, p6158-6169.). 10 μg MC-HBV1.3 in Ringer's Solution in a total volume of 10% of the animal's body weight was injected into mice via tail vein to create pHBV model of chronic HBV infection. The solution was injected through a 27-gauge needle in 5-7 seconds as previously described (Zhang G et al. “High levels of foreign gene expression in hepatocytes after tail vein injection of naked plasmid DNA.” Human Gene Therapy 1999 Vol. 10, p1735-1737.). At day −21, three weeks post transfection, Hepatitis B surface antigen (HBsAg) HBsAg expression levels in serum were measured by ELISA and the mice were grouped according to average HBsAg expression levels.

[0165] B) HBV RNAi triggers:

[0166] Structure of the Cholesterol-C6-RNAi trigger:

[chemical structure]

[0167] AD00009 and AD00010 were synthesized, purified, hydridized (sense and anti-sense strands), and combined at a 1:1 molar ratio. The combined RNAi triggers were used for all subsequent procedures.

[0168] Hepatitis B Virus RNAi triggers are described in U.S. Patent Publication US 2013-0005793 (U.S. Pat. No. 8,809,293), which is incorporated herein by reference.

[0169] C) ALP delivery peptide: CDM-NAG was added to MLP, SEQ ID NO: 650 (GIL MLP, L-form), in a 250 mM HEPES-buffered aqueous solution at a 5:1 (w/wv) ratio at room temperature and incubated for 30 min to yield MLP delivery peptide. The reaction mixture was adjusted to pH 9.0 with 4 M NaOH. The extent of the reaction was assayed using 2,4,6-trinitrobenzene-sulfonic acid and determined to be >95%. MLP delivery peptide was purified by tangential flow in 10 mM bicarbonate buffer, pH 9.0, to which 10% dextran (w/w) was added. The final purified material was lyophilized.

[0170] D) Formation of HBV RNAi trigger delivery composition: 5 mg lyophilized MLP delivery peptide was resuspended with 1 mL water. MLP delivery peptide was then combined with HBV RNAi triggers at a 1:1 ratio (w/w) (˜5.49:1 molar ratio). Isotonic glucose was added as necessary to bring the volume of each injection to 200 μl.
[0171] In some embodiments, the HBV RNAi triggers were at a concentration of 26 g/L in a solution that also contained 0.069 g/L sodium phosphate monobasic monohydrate and 0.071 g/L sodium phosphate dibasic heptahydrate.
[0172] In some embodiments, a 4.8 ml injected solution contained 25.0 g/L HBV RNAi triggers, 25.0 g/LMLP-(CDM-NAG), 0.066 g/L sodium phosphate monobasic monohydrate, 0.068 g/L sodium phosphate dibasic heptahydrate, 0.1 g/L dextran 1K, 0.318 g/L sodium carbonate and 0.588 g/L sodium bicarbonate.

[0173] E) RNAi trigger delivery: At day 1, each mouse was then given a single IV administration via tail vein of 200 μl containing 2, 4, or 8 mg/kg MLP delivery peptide+HBV RNAi triggers, isotonic glucose, or 8 mg/kg MLP delivery peptide.

[0174] F) Analyses: At various times, before and after administration of MLP delivery peptide+HBV RNAi triggers, isotonic glucose, or MLP delivery peptide alone, serum HBsAg, serum HBV DNA, or liver HBV RNA were measured. HBV expression levels were normalized to control mice injected with isotonic glucose.
[0175] i) Serum collection: Mice were anesthetized with 2-3% isoflurane and blood samples were collected from the submandibular area into serum separation tubes (Sarstedt AG & Co., Nimbrecht, Germany). Blood was allowed to coagulate at ambient temperature for 20 min. The tubes were centrifuged at 8,000×g for 3 min to separate the serum and stored at 4° C.
[0176] ii) Serum Hepatitis B surface antigen (HBsAg) levels: Serum was collected and diluted 10 to 2000-fold in PBS containing 5% nonfat dry milk. Secondary HBsAg standards diluted in the nonfat milk solution were prepared from serum of ICR mice (Harlan Sprague Dawley) that had been transfected with 10 μg HBsAg-expressing plasmid pRc/CMV-HBs (Aldevron, Fargo, ND). HBsAg levels were determined with a GS HBsAg EIA 3.0 kit (Bio-Rad Laboratories, Inc., Redmond, WA) as described by the manufacturer. Recombinant HBsAg protein, ayw subtype, also diluted in nonfat milk in PBS, was used as a primary standard (Aldevron).
[0177] HBsAg expression for each animal was normalized to the control group of mice injected with isotonic glucose in order to account for the non-treatment related decline in expression of MC-HBV1.3. First, the HBsAg level for each animal at a time point was divided by the pre-treatment level of expression in that animal (Day −1) in order to determine the ratio of expression “normalized to pre-treatment”. Expression at a specific time point was then normalized to the control group by dividing the “normalized to pre-treatment” ratio for an individual animal by the average “normalized to pre-treatment” ratio of all mice in the isotonic glucose control group.
[0178] iii) Serum HBVDNA levels: Equal volumes of serum from mice in a group were pooled to a final volume of 100 μL. DNA was isolated from serum samples using the QIAamp MinElute Virus Spin Kit (Qiagen. Valencia, CA) following the manufacturer's instructions. Sterile 0.9% saline was added to each sample to a final volume of 200 μL. Serum samples were added to tubes containing buffer and protease. Carrier RNA was added to aid in the isolation of small amounts of DNA. 1 ng of pHCR/UbC-SEAP plasmid DNA (Wooddell CI. et al. “Long-term RNA interference from optimized siRNA expression constructs in adult mice.” Biochem Biophys Res Commun (2005) 334, 117-127) was added as a recovery control. After incubating 15 min at 56° C., nucleic acids were precipitated from the lysates with ethanol and the entire solution applied to a column. After washing, the samples were eluted into a volume of 50 μL Buffer AVE.
[0179] The number of copies of HBV genomes in DNA isolated from the pHBV mouse model serum was determined by qPCR. Plasmid pSEAP-HBV353-777, encoding a short segment of the HBV genome within the S gene (bases 353-777 of GenBank accession #V01460), was used to create a six log standard curve. Samples with recovery of DNA below 2 standard deviations from the average, based on detection of pHCR/UbC-SEAP were omitted. TaqMan chemistry-based primers and probes with fluor/ZEN/IBFQ were utilized.

HBV primers:
(SEQ IF NO: 740)
5′-GCCGGACCTGCATGACTA-3′
and
(SEQ IF NO: 741)
5′-GGTACAGCAACAGGAGGGATACATA-3′
HBV probe: 6-carboxyfluorescein (FAM)-labeled
reporter:
(SEQ IF NO: 742)
5′-FAM/CTGCTCAAGGAACCTC-3′
hHCR (HCR/UbC-SEAP) primers:
(SEQ IF NO: 743)
5′-CATGCCACCTCCAACATCCACTC-3′
(SEQ IF NO: 744)
5-GGCATAGCCACTTACTGACGACTC-3′,
hHCR probe
(SEQ IF NO: 745)
5′-FAM/TTGTCCTGGC/ZEN/GTGGTTTAGGTAGTGTGA/IBFQ-3′

[0180] qPCR assays were performed on a 7500 Fast or StepOne Plus Real-Time PCR system (Life Technologies). For evaluation of HBV DNA in serum, DNA was isolated from duplicate purification steps from pooled group serum samples. Quantitations of HBV DNA and recovery control plasmid were determined by qPCR reactions performed in triplicate. The probes to quantitate HBV and pHCR/UbC-SEAP were included in each reaction.
[0181] iv) HBV RNA analysis: At various times, mice were euthanized and the liver was excised and placed into a 50-mL conical tube containing 12 ml of TRI Reagent RT (Molecular Research Center, Inc., Cincinnati, OH). Total RNA was isolated following the manufacturer's recommendation. Briefly, livers in TRI Reagent were homogenized using a Bio-Gen PRO200 tissue homogenizer (Pro Scientific, Inc., Oxford, CT) for approximately 30 seconds. 1 ml homogenate was added to 0.2 ml chloroform, mixed, and phases were separated by centrifugation. 0.1 ml of aqueous phase was removed, precipitated with isopropyl alcohol, and centrifuged. The resultant pellet was washed with 75% ethanol and resuspended in 0.4-0.6 ml nuclease-free water. Total RNA (50-500 ng) was reverse transcribed using the High Capacity cDNA Reverse Transcription Kit (Life Technologies, Grand Island, NY). The cDNA was then diluted 1:50 and multiplex RT-qPCR was performed using 5′ exonuclease chemistry with forward primer 5′-GCCGGACCTGCATGACTA-3′ (SEQ IF NO: 746), reverse primer 5′-GGTACAGCAACAGGAGGGATACATA-3′ (SEQ IF NO: 747), and 6-carboxyfluorescein (FAM)-labeled reporter 5′-CTGCTCAAGGAACCTC-3′ (SEQ IF NO: 748) for detection of HBV.
[0182] The RT-qPCR probe binds to all HBV RNA except the gene X transcript, which is expressed at nearly undetectable levels. Thus, the probe measured total HBV RNA. Gene expression assays for HBV, mouse β-actin, and Gene Expression Master Mix (Life Technologies, Grand Island, NY) were utilized. Gene expression data were analyzed using the comparative CT method of relative quantification (Livak K J et al. “Analysis of relative gene expression data using real-time quantitative PCR and the 2(-Delta Delta C(T))” Method. Methods 2001 Vol. 25, p402-408).
[0183] Total RNA from each animal was reverse transcribed to generate cDNA. The cDNA was assayed by duplicate qPCR reactions that measured the HBV total RNA and the endogenous control, mouse β-actin mRNA, in the same reaction.

ΔΔC_{T}=(C_{T}_{_{target}}−C_{T}_{_{control}})ₛₐₘₚₗₑ−(C_{T}_{_{target}}−C_{T}_{_{control}})_{reference}

Relative Expression=2^{-ΔΔC}^{_{T}}

Relative Expression of an individual=GEOMEAN of replicates

[0184] Low Range and High Range refer to 2^{-Avg.ΔΔC}^{_{T}}^{+S.D.ΔC}^{_{T}} and 2^{-Avg.ΔΔC}^{_{T}}^{-S.D.ΔC}^{_{T}}
[0185] v) Quantitation ofRNAi trigger in tissues: The levels of total guide strand, total full-length guide strand, and 5′-phosphorylated full length guide strand for HBV RNAi triggers AD00009 and AD00010 in the liver were measured at various times by fluorescent PNA probe hybridization and HPLC anion exchange chromatography. The guide strand becomes 5′-phosphorylated by endogenous cytoplasmic CLPI kinase (Weitzer S et al “The human RNA kinase hCLpl is active on 3′ transfer RNA exons and short interfering RNAs.” Nature 2007 Vol. 447, p²²²-2²⁷.). A fluorescently-labeled, sequence-specific peptide-nucleic acid (PNA) probe that hybridized to the guide strand was added to homogenized liver tissue. The probe-guide strand hybrid was analyzed by HPLC anion exchange chromatography that separated the guide strand based on charge.
[0186] Tissues were collected and immediately frozen in liquid nitrogen. Tissue samples were pulverized while frozen. Up to 25 mg frozen powder was solubilized in 1 mL of diluted Affymetrix Lysis Solution (one part Affymetrix Lysis Solution, two parts nuclease-free water) containing 50 μg/ml proteinase K. Samples were sonicated with a micro stick sonicator and incubated at 65° C. for 30 min. If samples needed further dilution, this was performed before the hybridization step, using the Affymetrix Lysis Solution diluted as described above. Serial dilutions of RNAi trigger standards were also prepared in diluted Lysis Solution.

RNAi trigger standard: RD74
sense
(SEQ IF NO: 749)
(NH₂C₆)CfuGfuAfgGfcAfuAfaAfuUfgGfuAf(invdT)
anti-sense
(SEQ IF NO: 750)
pdTAfcCfaAfuUfuAfuGfcCfuAfcAfgdTsdT
RNAi trigger standard: RD77
sense
(SEQ IF NO: 751)
(NH₂C₆)AfcCfuCfuGfcCfuAfaUfcAfuCfuAf(invdT)
anti-sense
(SEQ IF NO: 752)
pdTAfgAfuGfaUfuAfgGfcAfgAfgGfudTsdT

n = 2′-O-methyl, Nf = 2′-Fluoro, dN = deoxyribose,
inv = inverted, s = phosphorothioate bond.

[0187] SDS was precipitated from the standards and samples by adding 10 μl of 3M KCl to 100 μl of the tissue sample solution. After incubating 10 min on ice, samples were centrifuged for 15 min at 2,700×g. Quantitation of RNAi trigger was performed with the supernatant.
[0188] Sequence-specific peptide-nucleic acid (PNA) probes containing a fluorescent Atto 425 label at the N-terminus attached to the PNA chain via two ethylene glycol linkers (OO=PEG₂; PNA Bio, Thousand Oaks, CA) were designed to bind to the antisense strand of each HBV RNAi trigger.

Peptide-nucleic acid (PNA) probes
for AD00009
(SEQ IF NO: 753)
Atto425-OO-CTGTAGGCATAAATT
for A000010
(SEQ IF NO: 754)
Atto425-OO-ACCTCTGCCTAATCA

[0189] To 55 μl diluted serum sample was added 143 μL nuclease-free water, 11 μl 200 mM Tris-HCl (pH 8), and 11 μl 1 μM AD9 or AD10 PNA-probe solution in 96-well conical-bottom plates. The plate was sealed and incubated at 95° C. for 15 min in a thermal cycler. The temperature of the thermal cycler was reduced to 54° C. and samples were incubated for another 15 min. After incubation, samples were stored at 4° C. until they were loaded onto an autosampler for HPLC analysis.
[0190] HPLC analysis was carried out using a Shimadzu HPLC system equipped with an LC-20AT pump. SIL-20AC autosampler, RF-10Axl fluorescence detector, and a CTO-20Ac column oven (Shimadzu Scientific Instruments, Columbia, MD). The 96-well plate from the hybridization step was loaded onto the autosampler. Injection volumes of 100 μl were made onto a DNAPac PA-100 4×250 mm analytical column (#DX043010; Fisher Scientific, Pittsburgh, PA) with an attached 4×50 mm guard column (#DXSP4016; Fisher Scientific. Pittsburgh, PA). Analysis was carried out at a flow rate of 1 ml/min with a column oven temperature of 50° C. A gradient elution using mobile phase A (10 mM Tris-HCl (pH 7), 100 mM NaCl, 30% (v/v) Acetonitrile) and mobile phase B (10 mM Tris-HCl (pH 7), 900 mM NaCl, 30% (v/v) Acetonitrile).
[0191] Fluorescence detection was set to an excitation of 436 nm and an emission of 484 nm with a medium gain setting of 4. Concentrations of analytes eluted in the 7-10 min range were calculated using a 12-point external standard calibration curve. Calibration curves were generated with PNA-hybridized full length phosphorylated RNAi trigger RD74 and RD77.

TABLE 6
Gradient and elution times for PNA probe hybridization and HPLC
anion exchange chromatography analysis of RNAi trigger in liver.

| Time (min) | % Eluent A | % Eluent B | Curve |
|---|---|---|---|
| 0 | 80 | 20 | |
| 1.00 | 80 | 20 | Linear |
| 11.00 | 40 | 60 | Linear |
| 11.50 | 0 | 100 | Linear |
| 13.00 | 0 | 100 | Linear |
| 14.50 | 80 | 20 | Linear |
| 23.00 | 80 | 20 | Linear |

[0192] iv) Clinical chemistry: Clinical chemistry markers in mouse serum were measured using a COBAS Integra 400 (Roche Diagnostics, Indianapolis, IN) chemical analyzer according to the manufacturer's instructions.

[0193] G) Hepalilis B virus (HBV) knockdown in vivo:
[0194] HBVDNA: Maximum HBV DNA knockdown occurred at days 8 and 15 in mice treated with 8 mg/kg MLP delivery peptide+HBV RNAi triggers. Total HBV DNA in serum was reduced by 294-fold and 345-fold, respectively. On day 29, HBV DNA in serum of mice remained 13.5-fold lower than untreated control mice. Total HBV DNA was reduced 91.8-fold and 6.5-fold on day 8 in mice treated with 4 mg/kg and 2 mg/kg MLP delivery peptide+HBV RNAi triggers, respectively.
[0195] HBsAg in serum: Maximum knockdown occurred at days 8 and 15 in mice treated with 8 mg/kg MLP delivery peptide+HBV RNAi triggers. HBsAg in serum was reduced by 270-fold and 139-fold, respectively. On day 29, HBsAg in serum was 7.3-fold lower than untreated control mice. HBsAg in serum was reduced 71.4-fold and 5.4-fold and on day 8 in mice treated with 4 mg/kg and 2 mg/kg MLP delivery peptide+HBV RNAi triggers, respectively.
[0196] The duration of effect from a single 8 mg/kg dose was at least 28 days. HBsAg and HBV DNA were reduced by more than 95% through Day 22. HBV DNA and HBsAg levels in serum from mice that were injected with MLP delivery peptide (without HBV RNAi triggers) remained comparable to levels in mice that received a single injection of isotonic glucose (Table 7).
[0197] HBV RNA in liver: Maximum knockdown occurred at day 8 in mice treated with 8 mg/kg MLP delivery peptide+HBV RNAi triggers. Total HBV RNA in liver was reduced by an average of 12.5-fold. On day 29, total HBV RNA in the liver was 3.4-fold lower than the average of the untreated control group. Total HBV RNA was reduced 5.8-fold and 1.6-fold on day 8 in mice treated with 4 mg/kg and 2 mg/kg MLP delivery peptide+HBV RNAi triggers, respectively (Table 7).
[0198] Quantitation of RNAi trigger in tissues: Injection of 8 mg/kg MLP delivery peptide+HBV RNAi triggers into pHBV model mice resulted in approximately 80 ng/g HBV RNAi triggers in the cytoplasm of hepatocytes on day 8, as evidenced by 5′ phosphorylation of about 40 ng/g each full-length AD00009 and AD00010 guide strands. The resulting pharmacodynamic effects on day 8 were 93% knockdown of total HBV RNA and greater than 99% reduction in HBsAg and HBV DNA in the serum. On day 22, almost all of the guide strand in the liver was 5′ phosphorylated and full-length (Table 7).
[0199] Clinical chemistry: Liver and renal functions were evaluated on day −1 (pre-injection) and day 2 (24 hours post-injection). There were no MLP delivery peptide+HBV RNAi trigger-related changes in clinical chemistry nor was there any evidence of toxicity from either MLP delivery peptide+HBV RNAi triggers or MLP delivery peptide alone administration.

TABLE 7
Knockdown of HBsAg and HBV RNA and presence
of 5′ phosphorylated RNAi trigger in liver following
intravascular administration of MLP delivery peptide +
HBV RNAi triggers in HBV mouse model.

| | MLP delivery | | | |
|---|---|---|---|---|
| | peptide + | | | 5′ phosphorylated |
| | HBV RNAi | HBsAg | HBV RNA | RNAi trigger |
| | triggers | relative | relative | guide strand |
| day | (mg/kg) | knockdown | knockdown | (ng/g liver tissue) |
| 8 | 8 | 99.6 ± 0.4% | 93% | 76 |
| 15 | 8 | 99.3 ± 1.4% | 80% | 27 |
| 22 | 8 | 97 ± 5% | 76% | 12 |
| 29 | 8 | 86 ± 15% | 71% | 2-15 |
| 8 | 4 | 99% | 83% | 28 |
| 8 | 2 | 82% | 36% | 7 |

### Example 8. Antiviral Eficacy of RNAi in Chronic HBV Infection in Chimpanzee

[0200] A single chimpanzee chronically infected with HBV genotype B (chimpanzee 4x0139; genotype B; viral load ˜7×10⁹ GE/ml, 51.3-51.5 kg) was given the MLP delivery peptide+HBV RNAi triggers (AD00009 and AD00010) by IV infusion. The viral HBV DNA titer of this animal for 2 years preceding this trial ranged from 4×10⁹ to 1.3×10¹⁰ Genome Equivalents/ml (baseline value for this study). Blood samples was taken at health check (day −7) and again immediately before dosing to serve as the baseline samples (day 1). The health check included physical exam, CBC, and whole blood chemistries. 2 mg/kg MLP delivery peptide+HBV RNAi triggers (20.6 ml of 5 mg/ml MLP delivery peptide) was administered at day 1 by IV push over 3 minutes. 3 mg/kg MLP delivery peptide+HBV RNAi triggers (30.9 ml of 5 mg/ml MLP delivery peptide) was administered at day 15 by IV push over 3 minutes. Blood samples were obtained on days 4, 8, 11, 15, 22, 29, 36, 43, 57, 64, 71, 78, and 85. Liver biopsies were obtained three times, at health check, day 29 and day 57. Animals were sedated for all procedures. Sedations for bleeds and dosing were accomplished with Telazol™ (2 mg/kg) and xylazine (100 mg) administered intramuscularly as immobilizing agents. Yohimbine is used as a reversal agent for Xylazine at the end of the procedure.
[0201] Assays for serum and liver HBV DNA. HBV DNA levels were determined for serum and liver biopsy samples (baseline and days 29 and 57) using a TaqMan assay targeting the core and X regions. Both assays should detect all genomes. DNA was purified from 100 μl of serum or homogenized liver tissue using the Qiagen QiaAmp DNA Mini Kit (cat #51304), according to the manufacturer's protocol. DNA samples were analyzed by real time PCR using TaqMan technology with primers and probe designed against the HBV core gene.

forward primer,
(SEQ ID NO: 755)
HBV core F 5′ CGAGGCAGGTCCCCTAGAAG 3′;
reverse primer,
(SEQ ID NO: 756)
HBV core R 5′ TGCGACGCGGYGATTG 3′;
probe,
(SEQ ID NO: 757)
HBV core probe 5′ 6-FAM/AGAACTCCCTCGCCTCGCAGACG-6-
TAM 3′.

[0202] Liver DNA and RNA was also analyzed with primers and probe designed against the

HBV X gene forward primer,
(SEQ ID NO: 758)
HBV X F-CCGTCTGTGCCTTCTCATCTG
reverse primer,
(SEQ ID NO: 759)
HBV X R-AGTCCAAGAGTYCTCTTATGYAAGACCTT
probe,
(SEQ ID NO: 760)
HBV X 5′ 6-FAM/CCGTGTGCACTTCGCTTCACCTCTGC-6-TAM 3′

[0203] A plasmid containing an HBV DNA insert was used to generate a standard curve for each TaqMan assay ranging from 10 GE to 1 million GE. Samples were analyzed in TaqMan assays using an ABI 7500 sequence detector using the following cycle parameters: 2 min at 50° C./10 min at 95° C./45 cycles of 15 sec at 95° C./1 min at 60° C.
[0204] Liver HBV DNA levels were decreased 2.4-fold (core region PCR assay) and 2.7-fold (X region PCR assay) below baseline levels on day 29.
[0205] Serum HBV DNA levels dropped rapidly after the first dose with a 17-fold decline by day 4. The levels increased between days 8-15 from 18.8 to 6.7-fold below baseline. Following the second dose on day 15, a drop in viral DNA was observed, reaching 35.9-fold decline from baseline on day 22.
[0206] Serum HBsAg and HBeAg analyses. HBsAg levels were determined using an ELISA kit from BioRad (GS HBsAg EIA 3.0). Quantification of surface antigen was determined by comparing OD to known surface antigen standards. HBeAg quantification was determined for all bleeds using an ELISA kit from DiaSorin (ETI-EBK Plus).
[0207] HBsAg levels were markedly reduced, declining from a baseline level of 824 μg/ml to 151 μg/ml on day 29. Values had declined significantly by day 4 following the first dose of ARC 520 (18% decrease compared to baseline values). The values continued to drop through day 15 to 53% of baseline (2.1-fold), and reached the maximum decline of 81% (5.2-fold) on day 29.
[0208] Serum levels of HBeAg were 136 ng/ml at baseline and dropped to 12.5 ng/ml (10.9-fold) by day 4 following the first injection of ARC 520. Levels increased to 46 ng/ml (2.9-fold below baseline) on day 15. Following the second injection, the levels declined again to 28 ng/ml on day 22.
[0209] RT-PCR analysis oftytokine and chemokines. The transcript levels for ISG15, CXCL11 (I-TAC), CXCL10 (IP-10), CXCL9 (Mig), Interferon gamma (IFNγ) and GAPDH were determined by quantitative RT-PCR. Briefly, 200 ng of total cell RNA from liver was analyzed by qRT-PCR assay using primers and probe from ABI Assays-on-Demand™ and an ABI 7500 TaqMan sequence analyzer (Applied Biosystems/Ambion, Austin, TX). The qRT-PCR was performed using reagents from the RNA UltraSense™ One-Step Quantitative RT-PCR System (Invitrogen Corporation, Carlsbad, CA), and the following cycle settings: 48° C., 30 min; 95° C., 10 min; and 95° C., 15 sec; and 60° C., 1 min, the latter two for 45 cycles. Liver biopsies were immediately placed in RNAlater® Stabilization Reagent and processed as described by the manufacturer and RNA was extracted using RNA-Bee (Tel-Test, Inc Friendswood, TX) for total cell RNA. No substantial induction of these genes was noted.

[0210] Luminex analysis ojcytokines and chemokines. Monitoring of cytokines and chemokines was performed using a Luminex 100 with the xMAP (multi-analyte platform) system using a 39-plex human cytokine/chemokine kit (Millipore; Billerica, MA). Dilutions of standards for each cytokine were evaluated in each assay. Dilutions of standards for each cytokine were evaluated in each run to provide quantification. The following cytokines/chemokines were evaluated in serum samples using a luminex method: EGF, Eotaxin, FGF-2, Flt-3 Ligand, Fractalkine (CX3CLI), G-CSF, GM-CSF, GRO, IFNα2, IFNγ, IL-10, IL-12p40, IL-12p70, IL-13, IL-15, IL-17, IL-la, IL-10, IL-1 Receptor antagonist, IL-2, IL-3, IL-4, IL-5, IL-6, IL-7, IL-8, IL-9, IL-10, MCP-1 (CCL2). MCP-3 (CCL7), MDC (CCL22), MIP-la (CCL3). MIP-10 (CCL4), sCD40L, sIL-2 Receptor antagonist, TGFα, TNFα, TNFβ, VEGF. Similar to the hepatic transcripts, no substantial changes in chemokines and cytokines were observed during the therapy.
[0211] Clinical pathology Blood chemistries were determined with a Unicel DxC 600 Analyzer (Beckman Coulter, Inc., and Diagnostic Chemicals Ltd. Oxford, CT, USA). Whole blood chemistries had the following measurements: Na. K, Cl, Ca, CO₂, Phos., ALT, AST, GGT, LDH, Direct Bilirubin, Total Bilirubin, Alk Phos, BUN, Creatine, Creatine Kinase. Glucose, Total protein, Albumin, Cholesterol, Triglycerides. Values from uninfected animals from the same colony were used to establish normal ranges. Liver biopsies were taken from the anesthetized animal by a standard procedure. Biopsy material was divided immediately into a fraction for histopathology, and DNA and RNA analysis. Sections for histopathology were processed for fixation in 10% formalin in PBS, paraffin embedded and stained with hematoxylin and eosin. Fractions for DNA analysis were snap frozen. Fractions for RNA analysis were placed in RNAlater® Stabilization Reagent.
[0212] Immunohistochemical staining of liver. Liver biopsies were fixed in buffered-formalin, paraffin embedded, and sectioned at 4 microns. Slides were de-paraffinized in EZ-DeWax (BioGenex; HK 585-5K) 2× for 5 min and rinsed with water. Antigen retrieval was performed in a microwave pressure cooker for 15 min at 1000 Watts and 15 min at 300 Watts in citrate buffer (antigen retrieval solution; BioGenex; HK 086-9K). Cooled slides were rinsed with water and PBS and treated sequentially with peroxidase suppressor, universal block, and avidin (all reagents from Pierce 36000 Immunohisto Peroxidase Detection Kit). Slides were incubated sequentially for 1 h at room temperature with primary antibody diluted in universal block containing a biotin block, for 0.5 h with biotinylated goat anti-mouse IgG, and for 0.5 h with avidin-biotin complex (ABC). Slides were developed with Immpact Nova Red peroxidase substrate (Vector. SK-4805; Burlingame CA), counter stained Mayers (Lillie's) hematoxylin (DAKO, S3309), dehydrated and mounted in non-aqueous mounting media (Vector, VectaMount: H-5000). Rabbit anti-HBV core was prepared from purified core particles expressed in baculovirus.
[0213] Most hepatocytes were positive for HBV core antigen with intense staining of the cytoplasm and some staining of the nucleus. A decline in staining occurred at day 29 that was considered significant.

### Example 9. Reduction in Hepatitis B Virus (HBV) In Vivo Transgenic Mouse Model Following Delivery of HBV RNAi Triggers Using MLP Delivery Peptide

[0214] A) Transgenic HBV model mice: Transgenic HBV1.3.32 mice contain a single copy of the terminally redundant, 1.3-genome length human HBV genome of the ayw strain (GenBank accession number V01460) integrated into the mouse chromosomal DNA. High levels of HBV replication occur in the livers of these mice (Guidotti L G et al. “High-level hepatitis B virus replication in transgenic mice.” J Virol 1995 Vol. 69, p6158-6169).
[0215] Mice were selected for the study on the basis of the HBeAg level in their serum upon weaning. Mice were grouped such that the average HBeAg levels was similar in each group. Student's T-test was used to assure there were no significant differences between any of the groups relative to the control siLuc group.
[0216] MLP delivery peptide HBV RNAi trigger delivery composition (MLP delivery peptide+HBV RNAi triggers were prepared as described. AD00009, AD00010, RNAi trigger standard RD74, and RNAi trigger standard RD77 were prepared as described.

siLuc (firefly Luciferase RNAi trigger)
sense strand
(SEQ ID NO: 761)
Chol-uAuCfuUfaCfgCfuGfaGfuAfcUfuCfgAf(invdT)
anti-sense
(SEQ ID NO: 762)
UfsCfgAfaGfuAfcUfcAfgCfgUfaAfgdTsdT

[0217] B) HBV RNAi trigger delivery: Female HBV1.3.32 mice, 1.8-7.7 months old, were given a single IV injection into the retro-orbital sinus of 200 μl per 20 g body weight of 3 mg/kg or 6 mg/kg MLP delivery peptide+HBV RNAi triggers on day 1. Control mice injected with isotonic glucose or 6 mg/kg MLP delivery peptide+siLuc.
[0218] Serum collection: Mice were briefly anesthetized with 50% CO₂ and blood samples were collected from the retro-orbital sinus using heparinized Natelson micro blood collecting tubes (#02-668-10, Fisher Scientific, Pittsburgh, PA). Blood was transferred to microcentrifuge tubes, remaining at ambient temperature for 60-120 min during collection. Samples were then centrifuged at 14,000 rpm for 10 min to separate the serum, which was then stored at −20° C.

[0219] C) HBcAg knockdown: A qualitative assessment of HBV core antigen (HBcAg) distribution in the cytoplasm of hepatocytes following MLP delivery peptide mediated delivery of HBV RNAi triggers was performed by immunohistochemical staining of liver sections. The presence of cytoplasmic HBcAg indicates that the protein is being actively expressed. Tissue samples were fixed in 10% zinc-buffered formalin, embedded in paraffin, sectioned (3 μm), and stained with hematoxylin (Chisari F V et al. “Expression of hepatitis B virus large envelope polypeptide inhibits hepatitis B surface antigen secretion in transgenic mice.” J Virol 1986 Vol. 60, p880-887). The intracellular distribution of HBcAg was assessed by the labeled-avidin-biotin detection procedure (Guidotti L G et al. “Hepatitis B virus nucleocapsid particles do not cross the hepatocyte nuclear membrane in transgenic mice.” J Virol 1994 Vol. 68, 5469-5475). Paraffin-embedded sections in PBS, pH 7.4, were treated for 10 min at 37° C. with 3% hydrogen peroxide and washed with PBS. After the sections were blocked with normal goat serum for 30 min at room temperature, rabbit anti-HBcAg (Dako North America, Inc., Carpinteria. CA) primary antiserum was applied at a 1:100 dilution for 60 min at 37° C. After a wash with PBS, a secondary antiserum consisting of biotin-conjugated goat anti-rabbit immunoglobulin G F(ab9)2 (Sigma-Aldrich Co. LLC., St. Louis, MO) was applied at a 1:100 dilution for 30 min at 37° C. The antibody coated slides were washed with PBS, treated with the streptavidin-horseradish peroxidase conjugate (ExtrAvidin: Sigma-Aldrich Co. LLC., St. Louis, MO) at a 1:600 dilution for 30 min at 37° C., stained with 3-amino-9-ethyl carbazole (AEC: Shandon-Lipshaw, Pittsburgh, PA), and counterstained with Mayer's hematoxylin before being mounted. HBcAg levels and distribution within the hepatocytes were visually assessed. Cytoplasmic HBcAg was greatly reduced relative to nuclear HBcAg at days 15 and 29 following injection of 6 mg/kg MLP delivery peptide+HBV RNAi triggers, indicating knockdown of HBcAg expression.

TABLE 8
Qualitative assessment of HBcAg staining in the nucleus (n)
compared to HBcAg staining in the cytoplasm (c).

| | | nuclear (n) vs. |
|---|---|---|
| | | cytoplasmic (c) |
| Treatment | day | distribution |
| Isotonic glucose | 8 | n = c |
| | 8 | n = c |
| 6 mg/kg MLP delivery peptide + siLuc | 8 | n = c |
| 6 mg/kg MLP delivery peptide + | 8 | n = c |
| HBV RNAi triggers | 8 | n = c |
| | 15 | n >> c |
| | 15 | n >> c |
| | 29 | n >> c |
| | 29 | n >> c |

[0220] D) HBeAg knockdown: The effect of MLP delivery peptide mediated delivery of HBV RNAi trigger delivery on HBV e antigen (HBeAg) was determined by ELISA. Serum was collected from the mice at pre-injection day −1, 6 hours post-injection, and on days 3, 8, 15, 22, and 29. HBeAg analysis was performed with the HBe enzyme linked immunosorbent assay (ELISA) as described by the manufacturer (Epitope Diagnostics, San Diego, CA) using 2 μl of mouse serum. The level of antigen was determined in the linear range of the assay. The HBeAg levels for each animal and at each time point were normalized to the day −1 pre-dose level. The MLP delivery peptide+HBV RNAi triggers treatment groups were separately compared to the isotonic glucose group or the siLuc group. Paired T-tests were used to evaluate changes in HBeAg expression from day 3 to day 8.
[0221] The levels of HBeAg was reduced by 85-88% (7-8 fold) and day 3 and approximately 71-73% at day 8 for both dose levels. HBeAg remained reduced ˜66% at day 29 in animals treated with 6 mg/kg melittein delivery peptide+HBV RNAi triggers. These transgenic mice are known to produce HBeAg in their kidneys. The level of circulating HBeAg originating from the kidneys is not known.

TABLE 9
Relative HBeAg expression normalized to day −1 and
mean of combined control groups on day 3 or day 8

| | day | |
|---|---|---|
| treatment | 3 | 8 |
| Isotonic glucose | 1.09 ± 0.35 | 0.86 ± 0.09 |
| 6 mg/kg MLP delivery peptide + | 0.91 ± 0.04 | 1.14 ± 0.21 |
| siLuc | | |
| 3 mg/kg MLP delivery peptide + | 0.15 ± 0.05 | 0.29 ± 0.12 |
| HBV RNAi triggers | | |
| 6 mg/kg MLP delivery peptide + | 0.12 ± 0.07 | 0.27 ± 0.17 |
| HBV RNAi triggers | | |

TABLE 10
Relative HBeAg expression normalized to day −1 of each group

| | day | | | | | | |
|---|---|---|---|---|---|---|---|
| treatment | −1 | 0.25 | 3 | 8 | 15 | 22 | 29 |
| Isotonic glucose | 1.00 | 1.37 ± 0.26 | 1.75 ± 0.65 | 1.08 ± 0.14 | — | — | — |
| 6 mg/kg MLP delivery | 1.00 | 1.43 ± 0.09 | 1.46 ± 0.07 | 1.43 ± 0.30 | — | — | — |
| peptide + siLuc | | | | | | | |
| 3 mg/kg MLP delivery | 1.00 | 1.01 ± 0.26 | 0.24 ± 0.08 | 0.37 ± 0.16 | 0.51 ± 0.15 | — | — |
| peptide + HBV RNAi | | | | | | | |
| triggers | | | | | | | |
| 6 mg/kg MLP delivery | 1.00 | 0.96 ± 0.25 | 0.20 ± 0.11 | 0.34 ± 0.22 | 0.32 ± 0.14 | 0.25 ± 0.13 | 0.34 ± 0.18 |
| peptide + HBV RNAi | | | | | | | |
| triggers | | | | | | | |

[0222] E) HBV RNA knockdown: HBV produces at least 6 mRNA species that are in length: 3.5 kilobases (kb) (2 types), 2.4 kb, 2.1 kb (2 types) and 0.7 kb. One 3.5 kb mRNA that encodes HBeAg. HBeAg is a secreted protein. The other 3.5 kb mRNA is the pre-genomic RNA (pgRNA), whbich is translated to produce the core protein (HBcAg) and the polymerase. The pgRNA is reverse transcribed to generate the virion DNA. HBcAg protein monomers assemble to form the capsid that encloses the virion DNA. The 2.4 kb and 2.1 kb mRNAs encode the envelope (S) protein that are also called S antigen (HBsAg). The HBsAg proteins form the envelope around the viral capsid (Because transgenic HBV 1.3.32 mice produce antibodies to this protein, HBsAg was not measured.). The 0.7 kb mRNA encodes X protein and is usually undetectable in transgenic mice.
[0223] After mice were sacrificed, liver tissue was frozen in liquid nitrogen and stored at −70° C. prior to total RNA extraction. RNA was isolated and levels of the HBV transcripts were evaluated and quantitated relative to the housekeeping gene glyceraldehyde 3-phosphate dehydrogenase (GAPDH) by Northern blotting and by quantitative real-time PCR (RT-qPCR).
[0224] Northern analysis. RNA (Northern) filter hybridization analyses were performed using 10 μg of total cellular RNA. Filters were probed with ³²P-labeled HBV (strain ayw) genomic DNA to detect HBV sequences and mouse glyceraldehyde-3-phosphate dehydrogenase (GAPDH) cDNA to detect the GAPDH transcript used as an internal control. The radioactive hybridization signals corresponding to the 3.5 kb HBV RNA and the 2.1 kb RNA bands in the Northern blot were normalized to the signal corresponding to the GAPDH mRNA band from the same animal. The 2.1 kb HBV RNA:GAPDH ratio from each animal was divided by the average of this ratio in the combined controls groups, consisting of 4 mice injected with isotonic glucose and 4 mice treated with MLP delivery peptide+siLuc, to determine treatment-specific changes in the 2.1 kb HBV RNA. The 3.5 kb HBV RNA was analyzed by the same method. In both cases error is shown as the standard deviation of the ratio. Statistical significance was determined by a Student's two-tailed t-test. Results from RNA filter hybridization (Northem blot) analyses of total cellular RNA from liver tissue are shown in Table 11. MLP delivery peptide+HBV RNAi triggers treatment reduced viral RNA content in liver. No effects on viral RNA levels in liver were observed in animals receiving isotonic glucose or MLP delivery peptide+siLuc treatments.

TABLE 11
Northern blot analysis of knockdown of 2.1 kb HBV RNA
encoding HBsAg following single does MLP delivery peptide +
HBV RNAi triggers treatment in transgenic mice.

| | | HBV RNA/ | fold | | % RNA |
|---|---|---|---|---|---|
| treatment | day | GAPDH | reduction | P-value^{a} | knockdown ^{b} |
| Isotonic glucose | 8 | 2.79 ± 0.70 | | | |
| 6 mg/kg MLP delivery | 8 | 2.91 ± 0.20 | | | |
| peptide + siLuc | | | | | |
| 3 mg/kg MLP delivery | 8 | 0.527 ± 0.111 | 5.4 | <0.0001 | 81.5 ± 3.4 |
| peptide + HBV RNAi | 15 | 1.23 ± 0.84 | 2.3 | 0.002 | 56.7 ± 2.6 |
| triggers | | | | | |
| 6 mg/kg MLP delivery | 8 | 0.0487 ± 0.0419 | 58.4 | <0.0001 | 98.3 ± 1.3 |
| peptide + HBV RNAi | 15 | 0.0301 ± 0.0159 | 94.3 | <0.0001 | 98.9 ± 0.05 |
| triggers | 29 | 0.324 ± 0.220 | 8.8 | <0.0001 | 88.6 ± 6.7 |

^{a}Comparison of the mean of the treatment group against the combined mean of the control groups using a two-tailed unpaired t test.
^{b} HBV RNA levels normalized to combined average of control groups.

TABLE 12
Northern blot analysis of knockdown of 3.5 kb HBV RNA
following single does MLP delivery peptide +
HBV RNAi triggers treatment in transgenic mice.

| | | HBV RNA/ | | fold |
|---|---|---|---|---|
| treatment | day | GAPDH | P-value ^{a} | reduction ^{b} |
| Isotonic glucose | 8 | 1.72 ± 0.47 | | |
| 6 mg/kg MLP delivery | 8 | 1.72 ± 0.11 | | |
| peptide + siLuc | | | | |
| 3 mg/kg MLP delivery | 8 | 0.949 ± 0.458 | 0.006 | 1.8 |
| peptide + HBV RNAi | 15 | 1.11 ± 0.64 | 0.045 | 1.6 |
| triggers | | | | |
| 6 mg/kg MLP delivery | 8 | 0.335 ± 0.226 | <0.0001 | 5.1 |
| peptide + HBV RNAi | 15 | 0.795 ± 0.340 | 0.0009 | 2.2 |
| triggers | 29 | 0.969 ± 0.483 | 0.008 | 1.8 |

^{a} Comparison of the mean of the treatment group against the combined mean of the control groups using a two-tailed unpaired t test.
^{b} HBV RNA levels normalized to combined average of control groups.

[0225] RT-qPCR analyis. Quantitative PCR following a reverse transcription step (RT-qPCR) was used to measure the level of GAPDH and HBV 3.5 kb transcripts in HBV1.3.32 mouse liver RNA. After DNase I treatment, 1 μg of RNA was used for cDNA synthesis using the TaqMan reverse transcription reagents (Life Technologies, Grand Island, NY) followed by qPCR quantification using SYBR Green and an Applied Biosystems 7300 Real-Time PCR System. Thermal cycling consisted of an initial denaturation step for 10 min at 95° C. followed by 40 cycles of denaturation (15 sec at 95° C.) and annealing/extension (1 min at 60° C.). The relative HBV 3.5 kb RNA expression levels were estimated using the comparative CT (ACT) method with normalization to mouse GAPDH RNA. The PCR primers used were 5′-GCCCCTATCCTATCAACACTTCCGG-3′ (SEQ ID NO: 763)(HBV 3.5 kb RNA sense primer, coordinates 2,311 to 2,335), 5′-TTCGTCTGCGAGGCGAGGGA-3′ (SEQ ID NO: 764)(HBV 3.5 kb RNA antisense primer, coordinates 2401 to 2382), 5′-TCTGGAAAGCTGTGGCGTG-3′ (SEQ ID NO: 765)(mouse GAPDH sense primer), and 5′-CCAGTGAGCTTCCCGTTCAG-3′ (SEQ ID NO: 766)(mouse GAPDH antisense primer), respectively.

TABLE 13
RT-qPCT analysis of knockdown of 3.5 kb HBV RNA
following single does MLP delivery peptide +
HBV RNAi triggers treatment in transgenic mice.

| | | HBV RNA/ | | fold |
|---|---|---|---|---|
| treatment | day | GAPDH | P-value ^{a} | reduction ^{b} |
| Isotonic glucose | 8 | 2.88 ± 2.60 | | |
| 6 mg/kg MLP delivery | 8 | 2.36 ± 0.69 | | |
| peptide + siLuc | | | | |
| 6 mg/kg MLP delivery | 8 | 0.292 ± 0.280 | 0.45 | 8.8 |
| peptide + HBV RNAi | 15 | 0.452 ± 0.285 | 0.03 | 5.7 |
| triggers | 29 | 1.98 ± 1.45 | 0.55 | 1.3 |

^{a} Comparison of the mean of the treatment group against the combined mean of the control groups using a two-tailed unpaired t test.
^{b} HBV RNA levels normalized to combined average of control groups.

[0226] F) HBVDNA replication intermediate knockdown: After mice were sacrificed, liver tissue was frozen in liquid nitrogen and stored at −70° C. prior to DNA extraction. DNA was isolated from the liver and the HBV replicative intermediates were evaluated and quantitated relative to the transgene by Southern blotting. Southern blot analysis of 20 μg HindIII-digested total cellular DNA was performed using a ³²P-labelled HBV (strain ayw) genomic DNA. Relative levels of HBV replicative intermediates, the relaxed circular DNA (HBV RC DNA) and single-stranded DNA (HBV SS DNA), were normalized to levels of the HBV transgene (HBV transgene DNA) in the same animal following phosphorimager quantitation. The signal from the combined HBV RC and SS DNA: HBV Tg DNA from each animal was divided by the average of this ratio in the combined controls groups, consisting of 4 mice injected with isotonic glucose and 4 mice co-injected with MLP delivery peptide and siLuc, to determine treatment-specific changes in the replicative intermediates. Southern blot analysis indicated that all groups treated with MLP delivery peptide+HBV RNAi triggers had reduced levels of HBV replicatie intermediates (Tables 14-16). HBV DNA replication intermediates remained greatly suppressed for four weeks after a single injection of 6 mg/kg MLP delivery peptide+HBV RNAi triggers. ReplicatiVe intermediates were reduced 98-99% (64-74 fold) at one and two weeks and 97% (29-fold) at four weeks.

TABLE 14
HBV replication intermediate levels normalized
to a combined average of control groups

| | | | fold |
|---|---|---|---|
| treatment | day | | reduction |
| Isotonic glucose | 8 | 0.959 ± 0.495 | |
| 6 mg/kg MLP delivery | 8 | 1.042 ± 0.236 | |
| peptide + siLuc | | | |
| 3 mg/kg MLP delivery | 8 | 0.145 ± 0.029 | 6.9 |
| peptide + HBV RNAi | 15 | 0.240 ± 0.079 | 4.2 |
| triggers | | | |
| 6 mg/kg MLP delivery | 8 | 0.016 ± 0.027 | 63.5 |
| peptide + HBV RNAi | 15 | 0.013 ± 0.004 | 74.1 |
| triggers | 29 | 0.034 ± 0.033 | 29.1 |

TABLE 15
Ratio of HBV Replication Intermediates/HBV
Tg DNA as evaluated by Southern blot analysis.

| | | Ratio | |
|---|---|---|---|
| | | HBV Replication | |
| | | Intermediates/HBV | |
| treatment | day | Transgene DNA | P-value |
| Isotonic glucose | 8 | 37.3 ± 22.3 | |
| 6 mg/kg MLP delivery | 8 | 40.5 ± 10.6 | |
| peptide + siLuc | | | |
| combined average | | 38.9 | |
| 3 mg/kg MLP delivery | 8 | 5.63 ± 1.29 | 0.0006 |
| peptide + HBV RNAi | 15 | 9.33 ± 3.54 | 0.001 |
| triggers | | | |
| 6 mg/kg MLP delivery | 8 | 0.61 ± 1.23 | 0.0003 |
| peptide + HBV RNAi | 15 | 0.52 ± 0.17 | 0.0003 |
| triggers | 29 | 1.34 ± 1.47 | 0.0003 |

[0227] G) Quantitation of HBVRNAi trigger in hver: The amounts of HBV RNAi trigger guide strands in the livers of MLP delivery peptide+HBV RNAi triggers treated mice were quantitated by hybridization with a fluorescent peptide nucleic acid (PNA) probe as described. The PNA-hybridization method allowed quantitation of the total amount of guide strand, including metabolites of AD00009 and AD00010 (total, total full-length, 5′ phosphorylated full-length, and non-phosphorylated full-length) per weight of tissue. The presence of full length 5′ phosphorylated guide strand indicated efficient delivery of the RNAi trigger to the target cell cytoplasm.

TABLE 16
HBV RNAi trigger guide strand measured in liver homogenates.

| | MLP delivery | | | | | | |
|---|---|---|---|---|---|---|---|
| | peptide + | AD00009 guide strand | | | HBVRNAi trigger 10 guide strand | | |
| | HBV RNAi | (ng/g tissue) | | | (ng/g tissue) | | |
| | triggers | 5′ phosph. | total full | | 5′ phosph | total full | |
| day | (mg/kg) | full length | length | total | full length | length | total |
| 8 | 3 | 3.8 ± 1.4 | 3.8 ± 1.4 | 14.8 ± 3.8 | 0.8 ± 1.3 | 0.8 ± 1.3 | 0.8 ± 1.3 |
| 8 | 6 | 17.9 ± 8.2 | 21.3 ± 10.2 | 76.8 ± 34.1 | 11.5 ± 6.7 | 12.6 ± 7.6 | 18.8 ± 11.4 |
| 15 | 3 | 0.0 ± 0.0 | 0.0 ± 0.0 | 4.6 ± 1.6 | 0.0 ± 0.0 | 0.0 ± 0.0 | 3.4 ± 2.0 |
| 15 | 6 | 9.5 ± 2.2 | 9.5 ± 2.2 | 35.0 ± 15.7 | 4.8 ± .09 | 4.8 ± .09 | 5.9 ± 1.5 |
| 29 | 6 | 0.5 ± 0.8 | 0.5 ± 0.8 | 2.3 ± 2.4 | 0.0 ± 0.0 | 0.0 ± 0.0 | 2.1 ± 2.2 |

[0228] H) Clinical chemistry: Serum for clinical chemistry and cytokine evaluation was collected from each mouse at day −1 prior to injection and at 6 hr and 48 hr post-injection. Clinical chemistry analysis of alanine aminotransferase (ALT), Aspartate aminotransferase (AST), blood urea nitrogen (BUN), and creatinine was measured using a COBAS Integra 400 (Roche Diagnostics, Indianapolis, IN) chemical analyzer according to the manufacturer's instructions. Each assay required 2-23 μL serum, depending on the test. Clinical chemistries from all groups of animals were compared before and after injection by one-way ANOVA. Bonferroni's Multiple Comparison Test was used to compare individual group values before and after injection. There were no increases in ALT, AST, BUN, or creatinine 48 hr post-injection (FIGS. 3-4). A panel of 25 mouse cytokines were evaluated using a MILLIPLEX MAP Mouse Cy tokine/Chemokine Magnetic Bead Panel—Premixed 25 Plex—Immunology Multiplex Assay (Catalog #MCYTOMAG-70K-PMX, EMD Millipore Corporation, Billerica. MA): granulocyte colony-stimulating factor (G-CSF), granulocyte macrophage colony-stimulating factor (GM-CSF), interferon gamma (IFN-γ), interleukin-1 alpha (IL-1α), interleukin-1 beta (IL-1β), interleukin-2 (IL-2), interleukin-4 (IL-4), interleukin-5 (IL-5), interleukin-6 (IL-6), interleukin-7 (IL-7), interleukin-9 (IL-9), interleukin-10 (IL-10), interleukin-12 subunit p40 (IL-12p40), interleukin-12 subunit p70 (IL-12p70), interleukin-13 (IL-13), interleukin-15 (IL-15), interleukin-17 (IL-17), interferon gamma-induced protein-10 (IP-10), keratinocyte-derived cytokine (KC), monocyte chemoattractant protein-1 (MCP-1), macrophage inflammatory protein-1 alpha (MIP-1α), macrophage inflammatory protein-1 beta (MIP-10), macrophage inflammatory protein-2 (MIP2), regulated on activation, normal T cell expressed and secreted (RANTES) and tumor necrosis factor alpha (TNF-α). A few cytokines were elevated by the handling procedures, but appeared unrelated to MLP delivery peptide+HBV RNAi triggers treatment.
[0229] IL-6 levels were elevated in all groups at 6 h post-injection. Elevation was higher in mice receiving 3 mg/kg MLP delivery peptide+HBV RNAi triggers and highest-8-fold above the upper limit of normal (up to 170 μg/ml)—in mice receiving 6 mg/kg MLP delivery peptide+HBV RNAi triggers. IL-6 levels returned to normal by day 3, 48 hr after injection.
[0230] KC levels were elevated at 6 h, up to 40-fold above the upper limit of normal (103 μg/ml), but this elevation was similar in all treatment groups.
[0231] IP-10 levels were elevated less than 2-fold at 6 h and in some samples at 48 h. However, elevations were also in the isotonic glucose control group.
[0232] MIP2 is normally undetectable in mouse serum, but levels were elevated after injection in all groups, primarily at 6 hr.
[0233] G-CSF levels, while slightly elevated, 3-4 fold average at 6 hr post-injection, the group averages remained within normal range.
[0234] TNF-α and MCP-1 were elevated in all groups at 6 h, but remained well below the upper limit of normal.
[0235] One out of 12 mice injected with 6 mg/kg MLP delivery peptide+HBV RNAi triggers had an IL-7 level approximately 3-fold higher than the upper limit of normal at 6 h: 80 μg/ml.
[0236] Evaluation of liver or kidney toxicity showed minimal adverse effects. There were no increases relative to pre-injection in clinical chemistry markers for liver or kidney. Elevation of some cytokines was observed pre-dosing and a few cytokines were elevated by handling procedures that appeared to be unrelated to MLP delivery peptide+HBV RNAi triggers treatment.

### Example 10. Reduction in Hepatitis B Virus (HBY) In Vivo Following Delivery of HBV RNAi Triggers with MLP Delivery Peptide

[0237] pHBV model mice: At day −28, 6 to 8 week old female NOD.CB17-Prkdscid/NcrCrl (NOD-SCID) mice were transiently transfected in vivo with MC-HBV1.3 by hydrodynamic tail vein injection as described.

[0238] MLP delivery peptide: CDM-NAG was added to MLP, SEQ ID NO: 650 (GIL MLP, L-form), in a 250 mM HEPES-buffered aqueous solution at a 5:1 (w/w) ratio at room temperature and incubated for 30 min to yield MLP delivery peptide. The reaction mixture was adjusted to pH 9.0 with 4 M NaOH. The extent of the reaction was assayed using 2,4,6-trinitrobenzene-sulfonic acid and determined to be >95%. MLP delivery peptide was purified by tangential flow in 10 mM bicarbonate buffer, pH 9.0, to which 10% dextran (w/w) was added. The final purified material was lyophilized.

[0239] Formulation of HBV RNAi trigger delivery composition: 5 mg lyophilized MLP delivery peptide was resuspended with 1 mL water. MLP delivery peptide was then combined with HBV RNAi triggers (AD01385 or AD01386) at the various dose levels.

[0240] RNAi trigger delivery: At Day 1, each mouse was given a single IV administration via tail vein of 200 μl per 20 gram body weight of saline containing MLP delivery peptide+HBV RNAi triggers.

[0241] Analyses: At various time points, before and after administration of MLP delivery peptide+HBV RNAi triggers, serum HBsAg and serum HBV DNA were measured. The HBsAg level in serum for each animal at a time point was divided by the pre-treatment level in that animal in order to determine the ratio of HBsAg in serum “normalized to pre-treatment”. The HBV DNA level in serum for each group at a time point was also divided by the pre-treatment level in that group in order to determine the ratio of HBV DNA in serum “normalized to pre-treatment”. In order to account for non-treatment related decline in expression of MC-HBV 1.3 or pHBV1.3.—the “normalized to pre-treatment” ratio for an individual animal at a time point was then divided by the average “normalized to pre-treatment” ratio of all mice in the saline control group at the same time point to obtain the ratio of HBsAg, or HBV DNA, in serum “normalized to pre-treatment and control”.

[0242] Serum collection: Mice were anesthetized with 2-3% isoflurane and blood samples were collected from the submandibular area into serum separation tubes (Sarstedt AG & Co., Nambrecht, Germany). Blood was allowed to coagulate at ambient temperature for 20 min. The tubes were centrifuged at 8,000×g for 3 min to separate the serum and stored at 4° C. Serum Hepatitis B surface antigen (HBsAg) and Serum HBV DNA levels were measured as described.

TABLE 17
Summary of serum HBsAg in pHBV mice following co-administration of 3 mg/kg MLP delivery peptide
plus 1.5 mg/kg AD01385, or 1.5 mg/kg AD01386, or 1.5 mg/kg AD01385 + 1.5 mg/kg AD01386.

| | Mean HBsAg in serum (ng/mL) | | | | | | |
|---|---|---|---|---|---|---|---|
| Treatment | day −2 | day 5 | day 8 | day 15 | day 22 | day 29 | day 36 |
| Saline | 6291 ± 2304 | 6740 ± 3538 | 5825 ± 2789 | 3052 ± 1428 | 3186 ± 1506 | 3124 ± 1569 | 3140 ± 1198 |
| 1.5 mg/kg | 7218 ± 4071 | 878 ± 697 | 1905 ± 1232 | 2309 ± 1315 | 2163 ± 1255 | 2418 ± 1470 | 2067 ± 870 |
| AD01385 | | | | | | | |
| 1.5 mg/kg | 6219 ± 5606 | 125 ± 98 | 109 ± 120 | 273 ± 321 | 738 ± 670 | 1627 ± 1487 | 2252 ± 1565 |
| AD01386 | | | | | | | |
| 1.5 mg/kg | 7864 ± 7833 | 139 ± 119 | 138 ± 103 | 331 ± 253 | 1131 ± 1037 | 2066 ± 2259 | 2553 ± 2154 |
| AD01385 + | | | | | | | |
| 1.5 mg/kg | | | | | | | |
| AD01386 | | | | | | | |

TABLE 18
Summary of serum HBsAg levels normalized to pre-dose and the saline control group in
pHBV mice following co-administration of 3 mg/kg MLP delivery peptide plus 1.5 mg/kg
AD01385, or 1.5 mg/kg AD01386, or 1.5 mg/kg AD01385 + 1.5 mg/kg AD01386.

| | HBsAg in serum (mean ± SD) | | | |
|---|---|---|---|---|
| | (normalized to pre-dose and saline control group) | | | |
| treatment | day −2 | day 5 | day 8 | day 15 |
| Saline | 1.000 ± 0.000 | 1.000 ± 0.163 | 1.000 ± 0.295 | 1.000 ± 0.179 |
| 1.5 mg/kg AD01385 | 1.000 ± 0.000 | 0.108 ± 0.026 | 0.282 ± 0.030 | 0.665 ± 0.135 |
| 1.5 mg/kg AD01386 | 1.000 ± 0.000 | 0.021 ± 0.007 | 0.016 ± 0.008 | 0.078 ± 0.027 |
| 1.5 mg/kg AD01385 + | 1.000 ± 0.000 | 0.019 ± 0.006 | 0.023 ± 0.007 | 0.102 ± 0.018 |
| 1.5 mg/kg AD01386 | | | | |

| | day 22 | day 29 | day 36 |
|---|---|---|---|
| Saline | 1.000 ± 0.127 | 1.000 ± 0.204 | 1.000 ± 0.095 |
| 1.5 mg/kg AD01385 | 0.589 ± 0.109 | 0.660 ± 0.175 | 0.592 ± 0.140 |
| 1.5 mg/kg AD01386 | 0.237 ± 0.041 | 0.526 ± 0.045 | 0.808 ± 0.151 |
| 1.5 mg/kg AD01385 + | 0.308 ± 0.051 | 0.515 ± 0.077 | 0.679 ± 0.103 |
| 1.5 mg/kg AD01386 | | | |

TABLE 19
Serum HBV DNA in pHBV mice following co-administration of 3 mg/kg MLP delivery peptide
plus 1.5 mg/kg AD01385, or 1.5 mg/kg AD01386, or 1.5 mg/kg AD01385 + 1.5 mg/kg AD01386

| | Mean HBV DNA in serum (copies/mL) | | | | | | |
|---|---|---|---|---|---|---|---|
| Treatment | day −2 | day 5 | day 8 | day 15 | day 22 | day 29 | day 36 |
| Saline | 2.04 × 10⁸ ± | 1.99 × 10⁸ ± | 1.87 × 10⁸ ± | 1.32 × 10⁸ ± | 1.49 × 10⁸ ± | 1.32 × 10⁸ ± | 1.19 × 10⁸ ± |
| | 2.06 × 10⁷ | 3.41 × 10⁷ | 2.81 × 10⁷ | 1.32 × 10⁸ | 5.26 × 10⁶ | 2.34 × 10⁷ | 1.27 × 10⁷ |
| 1.5 mg/kg | 2.04 × 10⁸ ± | 9.84 × 10⁶ ± | 1.64 × 10⁷ ± | 7.69 × 10⁷ ± | 7.60 × 10⁷ ± | 7.69 × 10⁷ ± | 6.91 × 10⁷ ± |
| AD01385 | 1.12 × 10⁷ | 5.55 × 10⁵ | 2.80 × 10⁶ | 7.69 × 10⁷ | 6.87 × 10⁶ | 8.74 × 106 | 9.55 × 10⁵ |
| 1.5 mg/kg | 2.24 × 10⁸ ± | 4.42 × 10⁶ ± | 2.37 × 10⁶ ± | 1.04 × 10⁸ ± | 4.94 × 10⁷ ± | 1.04 × 10⁸ ± | 9.53 × 10⁷ ± |
| AD01386 | 1.97 × 10⁷ | 1.37 × 10⁵ | 1.65 × 10⁵ | 1.04 × 10⁸ | 3.57 × 10⁶ | 2.69 × 106 | 1.13 × 10⁷ |
| 1.5 mg/kg | 2.30 × 10⁸ ± | 4.71 × 10⁶ ± | 2.41 × 10⁶ ± | 1.07 × 10⁸ ± | 6.71 × 10⁷ ± | 1.07 × 10⁸ ± | 1.26 × 10⁸ ± |
| AD01385 + | 8.91 × 10⁶ | 6.96 × 10⁴ | 1.03 × 10⁶ | 1.07 × 10⁸ | 1.37 × 10⁶ | 8.16 × 106 | 3.24 × 10⁶ |
| 1.5 mg/kg | | | | | | | |
| AD01386 | | | | | | | |

TABLE 20
Serum HBV DNA in pHBV mice following co-administration of 3 mg/kg MLP delivery peptide
plus 1.5 mg/kg AD01385, or 1.5 mg/kg AD01386, or 1.5 mg/kg AD01385 + 1.5 mg/kg AD01386.

| | Mean HBV DNA in serum (normalized to pre-dose and saline control group) | | | | | | |
|---|---|---|---|---|---|---|---|
| Treatment | day −2 | day 5 | day 8 | day 15 | day 22 | day 29 | day 36 |
| Saline | 1.000 ± 0.000 | 1.000 ± 0.071 | 1.000 ± 0.249 | 1.000 ± 0.017 | 1.000 ± 0.066 | 1.000 ± 0.275 | 1.000 ± 0.006 |
| 1.5 mg/kg | 1.000 ± 0.000 | 0.050 ± 0.000 | 0.087 ± 0.020 | 0.474 ± 0.029 | 0.510 ± 0.074 | 0.571 ± 0.034 | 0.582 ± 0.040 |
| AD01385 | | | | | | | |
| 1.5 mg/kg | 1.000 ± 0.000 | 0.020 ± 0.002 | 0.011 ± 0.002 | 0.153 ± 0.004 | 0.303 ± 0.048 | 0.710 ± 0.080 | 0.728 ± 0.022 |
| AD01386 | | | | | | | |
| 1.5 mg/kg | 1.000 ± 0.000 | 0.021 ± 0.001 | 0.011 ± 0.005 | 0.105 ± 0.055 | 0.399 ± 0.007 | 0.707 ± 0.026 | 0.939 ± 0.061 |
| AD01385 + | | | | | | | |
| 1.5 mg/kg | | | | | | | |
| AD01386 | | | | | | | |

[0243] Results are also shown in FIG. 5, showing nearly 2 log knockdown at day 8.

### Example 11. Reduction in the Hepatitis B Virus (HBV) Viral Protein HBsAg in Chronically HBV Infected Chimpanzee Following Delivery of HBV RNAi Triggers with MLP Delivery Peptide

[0244] Chimpanzee: Animal 95A010 is a 19 year old female chimpanzee (date of birth Aug. 7, 1995) weighing 66 kg that was exposed to HBV at birth. At the start of the study she was HBeAg-negative and anti-HBe positive, and had a HBV DNA titer of 3.7×10³ copies/mL serum.

[0245] Formulation of HBV RNAi trigger delivery composition: MLP delivery peptide, Vial 1 contained MLP-(CDM-NAG) lyophilized in a sterile 10 mL glass vial at a strength of 125 mg. Active Pharmaceutical Ingredient (API), Vial 2, contained an equimolar mixture of AD0009 and AD0010 as a liquid at a strength of 26 mg/mL total RNAi trigger in 5.3 mL phosphate buffer in a sterile 10 mL glass vial. The 4.8 mL liquid from Vial 2 was added to Vial 1 and swirled to dissolve. The resulting solution contained 125 mg/vial at a nominal concentration of 25 mg/mL with respect to the active pharmaceutical ingredient in 5 mL. A sufficient number of paired vials were prepared for the indicated dose. To dose with 2 mg/kg MLP delivery peptide+1 mg/kg AD01385+1 mg/kg AD01386, a 26 mg/mL solution containing an equimolar amount of AD01385 and AD01386 in a phosphate buffer was used to solubilize MLP delivery peptide Vial 1.

[0246] RNAi trigger delivery: Chimp 95A010 was infused with 2 mg/kg MLP delivery peptide (formulated as MLP delivery peptide)+1 mg/kg AD0009+1 mg/mL AD0010 at an infusion rate of 10 mg/minute with respect to MLP delivery peptide. After HBsAg levels had returned to baseline following ARC-520 treatment, the chimp was infused with 2 mg/kg MLP delivery peptide+1 mg/kg AD01385+1 mg/kg AD01386.

[0247] Serum Hepatitis B surface antigen (HBsAg) levels: Serum was collected and diluted 10⁴ to 10⁵-fold in PBS containing 5% nonfat dry milk. In all other ways the assay was performed as described above.

[0248] Data. At Day 15 HBsAg levels were reduced 50% following injection of 1 mg/kg AD0009+AD0010 and 81% following injection of 1 mg/kg AD01385+AD01386, in both cases with 2 mg/kg MLP delivery peptide (FIG. 6).

TABLE 21
Summary of serum HBsAg in chimpanzee 95A010 following
co-administration of 2 mg/kg MLP delivery peptide,
1 mg/kg AD0009 and 1 mg/kg AD0010.

| | | % Expression, relative to |
|---|---|---|
| | HBsAg (μg/mL) | “Day 1” of treatment |
| Day of Treatment | Mean of replicates: | Mean of replicates: |
| 1 | 72.47 | 100.0% |
| 8 | 23.41 | 32.3% |
| 15 | 36.19 | 49.9% |
| 22 | 33.41 | 46.1% |
| 29 | 30.74 | 42.4% |

TABLE 22
Summary of serum HBsAg in chimpanzee 95A010 following
co-administration of 2 mg/kg MLP delivery peptide,
1 mg/kg AD01386 and 1 mg/kg AD01385.

| | | % Expression, relative to |
|---|---|---|
| | HBsAg (μg/mL) | day of injection |
| Day of Treatment | Mean of replicates: | Mean of replicates: |
| 1 | 47.55 | 100.00% |
| 15 | 9.04 | 19.01% |
| 29 | 10.33 | 21.73% |
| 43 | 26.40 | 55.52% |
| 57 | 43.20 | 90.85% |

### Example 12. Reduction in Hepatitis B Virus (HBV) In Vivo

[0249] pHBVmodel mice: At day −35, 6 to 8 week old female NOD.CB17-Prkdscid/NcrCrl (NOD-SCID) mice were transiently transfected in vivo with MC-HBV1.3 by hydrodynamic tail vein injection (Yang P L et al. “Hydrodynamic injection of viral DNA: a mouse model of acute hepatitis B virus infection.” Proc Natl Acad Sci USA 2002 Vol. 99: p. 13825-13830). MC-HBV1.3 is a plasmid-derived minicircle that contains the same terminally redundant human hepatitis B virus sequence HBV 1.3 as in the HBV1.3.32 transgenic mice (GenBank accession #V01460) (Guidotti L G et al. “High-level hepatitis B virus replication in transgenic mice. J Virol 1995 Vol. 69, p6158-6169.). 5 μg MC-HBV1.3 in Ringer's Solution in a total volume of 10% of the animal's body weight was injected into mice via tail vein to create pHBV model of chronic HBV infection. The solution was injected through a 27-gauge needle in 5-7 seconds as previously described (Zhang G et al. “High levels of foreign gene expression in hepatocytes after tail vein injection of naked plasmid DNA.” Human Gene Therapy 199) Vol. 10, p1735-1737.). At day −7, four weeks after transfection, Hepatitis B surface antigen (HBsAg) HBsAg expression levels in serum were measured by ELISA and the mice were grouped according to average HBsAg expression levels.

[0250] RNAi trigger delivery: At day 1, each mouse was then given a single subcutaneous administration of 200 μl containing HBV RNAi trigger and normal saline. A typical site for performing injections between the skin and muscle (i.e. subcutaneous injections) was into the loose skin over the neck and shoulder area, but other sites with loose folds of skin can also be used.

[0251] Analyses: At various times, before and after administration of HBV RNAi triggers or normal saline, serum HBsAg, serum HBV DNA, or liver HBV RNA were measured. HBV expression levels were normalized to control mice injected with normal saline.
[0252] i) Serum collection: Mice were anesthetized with 2-3% isoflurane and blood samples were collected from the submandibular area into serum separation tubes (Sarstedt AG & Co., Numbrecht, Germany). Blood was allowed to coagulate at ambient temperature for 20 min. The tubes were centrifuged at 8,000×g for 3 mm to separate the serum and stored at 4° C.
[0253] ii) Serum Hepatitis B surface antigen (HBsAg) levels: Serum was collected and diluted 10 to 20(0-fold in PBS containing 5% nonfat dry milk. Secondary HBsAg standards diluted in the nonfat milk solution were prepared from serum of ICR mice (Harlan Sprague Dawley) that had been transfected with 10 μg HBsAg-expressing plasmid pRc/CMV-HBs (Aldevron, Fargo, ND). HBsAg levels were determined with a GS HBsAg ETA 3.0 kit (Bio-Rad Laboratories, Inc., Redmond, WA) as described by the manufacturer. Recombinant HBsAg protein, avw subtype, also diluted in nonfat milk in PBS, was used as a primary standard (Aldevron).
[0254] HBsAg expression for each animal was normalized to the control group of mice injected with normal saline in order to account for the non-treatment related decline in expression of MC-HBV1.3. First, the HBsAg level for each animal at a time point was divided by the pre-treatment level of expression in that animal (Day −1) in order to determine the ratio of expression “normalized to pre-treatment”. Expression at a specific time point was then normalized to the control group by dividing the “normalized to pre-treatment” ratio for an individual animal by the average “normalized to pre-treatment” ratio of all mice in the normal saline control group.

TABLE 23
Hepatitis B virus (HBV) knockdown in
vivo as determined by HBsAg in serum.

| | HBsAg in serum | | |
|---|---|---|---|
| RNAi | at nadir | % KD | Day of |
| trigger | (norm. fraction) | at nadir | nadir |
| AD03364 | 0.37 | 62.9% | 8 |
| AD03365 | 0.58 | 42.2% | 8 |
| AD03366 | 0.64 | 93.5% | 8 |
| AD03367 | 0.027 | 97.3% | 8 |
| AD03368 | 0.35 | 65.4% | 15 |
| AD03369 | 0.55 | 45.0% | 15 |
| AD03370 | 0.70 | 29.6% | 8 |
| AD03373 | 0.083 | 91.7% | 8 |
| AD03374 | 0.072 | 92.8% | 8 |
| AD03375 | 0.37 | 63.0% | 8 |
| AD03376 | 0.32 | 68.3% | 8 |
| AD03377 | 0.23 | 76.6% | 8 |
| AD03378 | 0.17 | 82.9% | 8 |
| AD03381 | 0.54 | 46.3% | 8 |
| AD03382 | 0.63 | 37.0% | 8 |
| AD03383 | 0.80 | 20.2% | 8 |
| AD03384 | 0.64 | 35.5% | 15 |
| AD03385 | 0.46 | 53.9% | 15 |
| AD03386 | 0.67 | 32.8% | 8 |
| AD03387 | 0.50 | 50.4% | 8 |
| AD03388 | 0.47 | 53.1% | 15 |
| AD03389 | 0.44 | 55.8% | 8 |
| AD03390 | 0.45 | 55.0% | 8 |
| AD03396 | 0.46 | 54.4% | 8 |
| AD03397 | 0.50 | 50.3% | 8 |
| AD03398 | 0.46 | 54.0% | 8 |
| AD03399 | 0.22 | 77.9% | 8 |
| AD03401 | 0.39 | 61.2% | 8 |
| AD03402 | 0.40 | 60.2% | 8 |
| AD03403 | 0.11 | 88.5% | 8 |
| AD03404 | 0.37 | 62.5% | 8 |
| AD03405 | 0.13 | 87.3% | 8 |
| AD03406 | 0.088 | 91.2% | 8 |
| AD03408 | 0.016 | 98.4% | 22 |
| AD03409 | 0.008 | 99.2% | 15 |
| AD03410 | 0.057 | 94.3% | 15 |
| AD03411 | 0.28 | 72.4% | 8 |
| AD03412 | 0.75 | 24.6% | 15 |
| AD03413 | 0.51 | 49.0% | 8 |
| AD03414 | 0.40 | 60.0% | 8 |
| AD03217 | 0.065 | 92.9% | 15 |
| AD03055 | 0.11 | 89.1% | 8 |
| AD03218 | 0.047 | 95.0% | 15 |
| AD02729 | 0.095 | 90.5% | 8 |
| AD03498 | 0.087 | 91.3% | 8 |
| AD03499 | 0.069 | 93.1% | 15 |
| AD03500 | 0.095 | 90.5% | 8 |
| AD03501 | 0.046 | 95.4% | 15 |
| AD03502 | 0.17 | 83.0% | 8 |
| AD03503 | 0.20 | 79.8% | 8 |
| AD03504 | 0.19 | 81.1% | 8 |
| AD03509 | 0.14 | 86.5% | 15 |
| AD03510 | 0.32 | 68.2% | 15 |
| AD03511 | 0.11 | 88.9% | 15 |

### Example 13. Chromatography Analysis of HBV RNAi Triggers

[0255] Clinical development requires that the active pharmaceutical ingredient (API) be quantified in a drug product.

[0256] When the drug product is a mixture of two APIs, such as with the combination of AD01385 and AD01386, quantitation requires clean analytical separation. For oligonucleotides APIs, clean analytical separation is difficult due to compositional similarities of oligonucleotides of the same length. To facilitate the chromatographic separation of the sense strands of AD01385 and AD01386 mixture, a linker containing six carbons (C6) between cholesterol and the oligonucleotide was incorporated in one strand and a triethylene oxide (TEG) linker was used in the other strand. These linkers have different hydrophobicities which allow for chromatographic resolution. The RNAi trigger sense strands are separated by anion exchange chromatography using a Thermo Scientific DNAPac PA-200 column using a gradient from 70:30 mixture of (10 mM NaHCO3 (pH 11.3)/50 mM NaBr/45% ACN):(10 mM NaHC03 (pH 11.3)/650 mM NaBr/45% ACN) to 100% of the 650 mM NaBr solution (See FIGS. 24-28). The peaks for the sense strands were analyzed for the resolution (Rₛ), which is calculated as:

Rₛ=(t_{R2}−t_{R1})/((0.5*(w₁+w₂)) (1)

[0257] where t_{R1} and t_{R2} are the retention times for the two strands, and w₁ and w₂ are the peak widths at the baseline. If Rₛ>2, the peaks are considered resolved. We calculate that the mixtures of sense strands with different permutations of C6 and TEG linkers have the following resolutions:

TEG:TEG resolution Rₛ=0.44 (Not resolved)

C6:C6 resolution Rₛ=0.15 (Not resolved)

C6:TEG resolution Rₛ=2.7 (Resolved)

[0258] The RNAi trigger sense strands with the same Cholesterol targeting group linkage (both C6 or both TEG) were not resolved. In contrast, we were able to determine the concentrations of sense strands with TEG and C6 linkers from mixtures of the two due to their well-resolved chromatographic separations. The results, shown in Table 23 and in FIGS. 7-11 show that two HBV RNAi triggers are better resolved when linked by two different linkers.

[0259] In some embodiments, HBV RNAi triggers AD1385 and AD1386 are combined to form a therapeutic RNAi treatment for HBV infection.

TABLE 24
Chromatographic analyses of HBV RNAi trigger strands.

| | | HPLC Retention Time (minutes) | | | | | | |
|---|---|---|---|---|---|---|---|---|
| | | AM02312- | AM02315- | AM02316- | AM02319- | AM02320- | AM02323- | |
| Sample Mixture | Linker(s) | AS | AS | SS | SS | SS | SS | resolved |
| Antisense strands | | | | | | | | |
| Separate runs | | 15.2 | 15.6 | | | | | |
| Antisense strand combination | | | | | | | | |
| AM02312-AS + AM02315-AS | | 15.3 | 15.6 | | | | | partial |
| Sense Strands | | | | | | | | |
| Separate runs | TEG | | | 16.2 | 16.3 | | | |
| Separate runs | C6 | | | | | 16.9 | 17.1 | |
| Sense strand combinations | | | | | | | | |
| AM02320-SS + AM02323-SS | C6/C6 | | | | | 17.0 | 17.0 | no |
| AM02319-SS + AM02316-SS | TEG/TEG | | | 16.3 | 16.3 | | | no |
| AM02320-SS + AM02319-SS | C6/TEG | | | | 16.4 | 17.0 | | YES |
| AM02323-SS + AM02316-SS | C6/TEG | | | 16.3 | | | 17.1 | YES |
| Duplexes | | | | | | | | |
| AM02320-SS/AM02312-AS | C6 | 15.3 | | | | 17.0 | | YES |
| AM02319-SS/AM02315-AS | TEG | | 15.6 | | 16.4 | | | YES |
| AM02316-SS/AM02312-AS | TEG | 15.3 | | 16.3 | | | | YES |
| RNAi trigger combinations | | | | | | | | |
| AM02320-SS/AM02312-AS + | C6 | 15.3 | 15.7 | | | 17.0 | 17.0 | no |
| AM02323-SS/AM02315-AS | C6 | | | | | | | |
| AM02316-SS/AM02312-AS + | TEG | 15.3 | 15.7 | 16.3 | 16.3 | | | no |
| AM02319-SS/AM02315-SS | TEG | | | | | | | |
| AM02320-SS/AM02312-AS + | C6 | 15.3 | 15.7 | | 16.4 | 17.0 | | YES |
| AM02319-SS/AM02315-AS | TEG | | | | | | | |
| AM02316-SS/AM02312-AS + | TEG | 15.3 | 15.7 | 16.3 | | | 17.1 | YES |
| AM02323-SS/AM02315-AS | C6 | | | | | | | |

1. A composition for inhibiting expression of a hepatitis B virus gene comprising:
(a) MLP-(L-T)ₓ wherein
MLP is a melittin-like peptide,
L-T has the structure represented by —CO—C(CH₃)═C(T)-COOH or
—CO—C(T)=C(CH₃)—COOH, wherein T comprises a targeting ligand having affinity for the an asialoglycoprotein receptor, and
x is greater than 80% of the number of primary amines of a population of MLPs, and
(b) an HBV RNAi trigger comprising an antisense strand and a sense strand wherein the antisense strand comprises nucleotides 2-18 of any of SEQ ID NO: 1-102.

2. The composition of claim 1, wherein the HBV RNAi trigger comprises a sense strand comprising nucleotides 2-18 of any of SEQ ID NO: 103-209.

3. The composition of claim 1, wherein the HBV RNAi trigger comprises a sense strand covalently linked to a cholesteryl group via a TEG group or a C6 group.

4-6. (canceled)

7. The composition of claim 1 wherein the MLP comprises the amino acid sequence of SEQ ID NO: 650, SEQ ID NO: 644, SEQ ID NO: 654, SEQ ID NO: 694, SEQ ID NO: 700, SEQ ID NO: 701, SEQ ID NO: 751, or SEQ ID NO: 755.

8. (canceled)

9. The composition of claim 1 wherein T comprises N-acetylgalactosamine (GalNAc).

10. The composition of claim 9 wherein -(L-T) has the structure represented by: [chemical structure]
wherein n=1.

11. The composition of claim 1 wherein at least one nucleotide of the HBV RNAi trigger is modified.

12. The composition of claim 11 wherein the antisense strand of the HBV RNAi trigger comprises the nucleotide sequence of any of SEQ ID NO: 210-414.

13. The composition of claim 12 wherein the sense strand of the HBV RNAi trigger comprises the nucleotide sequence of any of SEQ ID NO: 415-643.

14-29. (canceled)

30. An HBV RNAi trigger comprising a sense strand and an antisense strand, wherein the sense strand comprises a modified nucleotide sequence according to:
(a) nucleotides 8-26 of SEQf5 ID NO: 550;
(b) nucleotides 5-23 of SEQ ID NO: 608;
(c) nucleotides 7-24 of SEQ ID NO: 624;
(d) nucleotides 1-19 of SEQ ID NO: 629;
(e) nucleotides 3-21 of SEQ ID NO: 630;
(f) nucleotides 3-20 of SEQ ID NO: 631;
(g) nucleotides 3-20 of SEQ ID NO: 632; or
(h) nucleotides 3-12 of SEQ ID NO: 634.

31. The HBV RNAi trigger of claim 30, wherein the antisense strand comprises a nucleobase sequence according to:
(a) nucleobases 1-18 of SEQ ID NO: 17;
(b) nucleobases 1-19 of SEQ ID NO: 75;
(c) nucleobases 1-19 of SEQ ID NO: 76;
(d) nucleobases 1-20 of SEQ ID NO: 92; or
(e) nucleobases 1-19 of SEQ ID NO: 95.

32. The HBV RNAi trigger of claim 30, wherein the antisense strand comprises a modified nucleotide sequence according to:
(a) nucleotides 1-19 of SEQ ID NO: 371;
(b) nucleotides 1-19 of SEQ ID NO: 372;
(c) nucleotides 1-19 of SEQ ID NO: 401;
(d) nucleotides 1-19 of SEQ ID NO: 402;
(e) nucleotides 2-19 of SEQ ID NO: 403; or
(f) nucleotides 2-19 of SEQ ID NO: 404.

33. An HBV RNAi trigger comprising a sense strand and an antisense strand, wherein the antisense strand comprises a modified nucleotide sequence according to:
(a) nucleotides 1-19 of SEQ ID NO: 370;
(b) nucleotides 1-19 of SEQ ID NO: 371;
(c) nucleotides 1-19 of SEQ ID NO: 372;
(d) nucleotides 1-19 of SEQ ID NO: 396;
(e) nucleotides 1-19 of SEQ ID NO: 401; or
(f) nucleotides 1-19 of SEQ ID NO: 402.

34. The HBV RNAi trigger of claim 33, wherein the sense strand comprises a nucleobase sequence according to:
(a) nucleobases 5-23 of SEQ ID NO: 179;
(c) nucleobases 7-24 of SEQ ID NO: 192;
(b) nucleobases 1-19 of SEQ ID NO: 196;
(c) nucleobases 1-21 of SEQ ID NO: 197;
(c) nucleobases 1-21 of SEQ ID NO: 198;
(c) nucleobases 1-19 of SEQ ID NO: 199;
(c) nucleobases 3-21 of SEQ ID NO: 200;

35. The HBV RNAi trigger of claim 33, wherein the sense strand comprises a modified nucleotide sequence according to:
(a) nucleotides 5-23 of SEQ ID NO: 608;
(b) nucleotides 7-24 of SEQ ID NO: 624;
(c) nucleotides 1-19 of SEQ ID NO: 629;
(d) nucleotides 3-21 of SEQ ID NO: 630;
(e) nucleotides 3-20 of SEQ ID NO: 631;
(f) nucleotides 3-20 of SEQ ID NO: 632; or
(g) nucleotides 3-12 of SEQ ID NO: 634.

36. The HBV RNAi trigger of claim 32, wherein the sense strand of the HBV RNAi trigger is covalently linked to a cholesteryl group.

37. The HBV RNAi trigger of claim 32, wherein the sense strand is conjugated to a galactose trimer.

38. The HBV RNAi trigger of claim 35, wherein the sense strand of the HBV RNAi trigger is covalently linked to a cholesteryl group.

39. The HBV RNAi trigger of claim 35, wherein the sense strand is conjugated to a galactose trimer.

40. A method of treating a subject with an HBV infection, comprising administering to the subject an effective amount of an RNAi agent according to claim 30.

The application's sequence listing, which the Patent Office published only in electronic form, follows.

SEQUENCE LISTING (766 sequences)

SEQ ID NO: 1 - RNA, 21 nt, synthetic construct
  modified_base 1: mod_base = OTHER; note = thymine
  modified_base 20..21: mod_base = OTHER; note = thymine
  misc_feature 1..21: note = HBV RNAi trigger antisense strand
  modified_base 2..19: mod_base = OTHER; note = "2'-hydroxy nucleoside"
  modified_base 1: mod_base = OTHER; note = thymine
  modified_base 20: mod_base = OTHER; note = thymine
  modified_base 21: mod_base = OTHER; note = thymine
  source 1..21: mol_type = other RNA
taccaatttatgcctacagtt

SEQ ID NO: 2 - RNA, 21 nt, synthetic construct
  modified_base 1: mod_base = OTHER; note = thymine
  modified_base 20..21: mod_base = OTHER; note = thymine
  misc_feature 1..21: note = HBV RNAi trigger antisense strand
  modified_base 2..19: mod_base = OTHER; note = "2'-hydroxy nucleoside"
  modified_base 1: mod_base = OTHER; note = thymine
  modified_base 20: mod_base = OTHER; note = thymine
  modified_base 21: mod_base = OTHER; note = thymine
  source 1..21: mol_type = other RNA
tatgataaaacgccgcagatt

SEQ ID NO: 3 - RNA, 21 nt, synthetic construct
  modified_base 1: mod_base = OTHER; note = thymine
  modified_base 20..21: mod_base = OTHER; note = thymine
  misc_feature 1..21: note = HBV RNAi trigger antisense strand
  modified_base 2..19: mod_base = OTHER; note = "2'-hydroxy nucleoside"
  modified_base 1: mod_base = OTHER; note = thymine
  modified_base 20: mod_base = OTHER; note = thymine
  modified_base 21: mod_base = OTHER; note = thymine
  source 1..21: mol_type = other RNA
tagatgattaggcagaggttt

SEQ ID NO: 4 - RNA, 21 nt, synthetic construct
  modified_base 1: mod_base = OTHER; note = thymine
  modified_base 20..21: mod_base = OTHER; note = thymine
  misc_feature 1..21: note = HBV RNAi trigger antisense strand
  modified_base 2..19: mod_base = OTHER; note = "2'-hydroxy nucleoside"
  modified_base 1: mod_base = OTHER; note = thymine
  modified_base 20: mod_base = OTHER; note = thymine
  modified_base 21: mod_base = OTHER; note = thymine
  source 1..21: mol_type = other RNA
tacaaatggcactagtaaatt

SEQ ID NO: 5 - RNA, 26 nt, synthetic construct
  modified_base 1: mod_base = OTHER; note = thymine
  misc_feature 1..26: note = HBV RNAi trigger antisense strand
  modified_base 2..25: mod_base = OTHER; note = "2'-hydroxy nucleoside"
  modified_base 1: mod_base = OTHER; note = thymine
  source 1..26: mol_type = other RNA
taccaatttatgcctacaggccttat

SEQ ID NO: 6 - RNA, 26 nt, synthetic construct
  modified_base 1: mod_base = OTHER; note = thymine
  misc_feature 1..26: note = HBV RNAi trigger antisense strand
  modified_base 2..25: mod_base = OTHER; note = "2'-hydroxy nucleoside"
  modified_base 1: mod_base = OTHER; note = thymine
  source 1..26: mol_type = other RNA
tatgataaaacgccgcagacacatat

SEQ ID NO: 7 - RNA, 26 nt, synthetic construct
  modified_base 1: mod_base = OTHER; note = thymine
  misc_feature 1..26: note = HBV RNAi trigger antisense strand
  modified_base 2..25: mod_base = OTHER; note = "2'-hydroxy nucleoside"
  modified_base 1: mod_base = OTHER; note = thymine
  source 1..26: mol_type = other RNA
tagatgattaggcagaggttgaatat

SEQ ID NO: 8 - RNA, 26 nt, synthetic construct
  misc_feature 1..26: note = HBV RNAi trigger antisense strand
  source 1..26: mol_type = other RNA
tgataaaacgccgcagacacatctat

SEQ ID NO: 9 - RNA, 26 nt, synthetic construct
  misc_feature 1..26: note = HBV RNAi trigger antisense strand
  source 1..26: mol_type = other RNA
tgaacaaatggcactagtaaacttat

SEQ ID NO: 10 - RNA, 26 nt, synthetic construct
  misc_feature 1..26: note = HBV RNAi trigger antisense strand
  source 1..26: mol_type = other RNA
tgcgtcagcaaacacttggcacatat

SEQ ID NO: 11 - RNA, 26 nt, synthetic construct
  misc_feature 1..26: note = HBV RNAi trigger antisense strand
  source 1..26: mol_type = other RNA
tgaaccactgaacaaatggcacttat

SEQ ID NO: 12 - RNA, 26 nt, synthetic construct
  misc_feature 1..26: note = HBV RNAi trigger antisense strand
  source 1..26: mol_type = other RNA
taacgggcaacataccttgataatat

SEQ ID NO: 13 - RNA, 26 nt, synthetic construct
  misc_feature 1..26: note = HBV RNAi trigger antisense strand
  source 1..26: mol_type = other RNA
tactagtaaactgagccaggagatat

SEQ ID NO: 14 - RNA, 26 nt, synthetic construct
  misc_feature 1..26: note = HBV RNAi trigger antisense strand
  source 1..26: mol_type = other RNA
tggacaaacgggcaacatacctttat

SEQ ID NO: 15 - RNA, 26 nt, synthetic construct
  misc_feature 1..26: note = HBV RNAi trigger antisense strand
  source 1..26: mol_type = other RNA
tacgggcaacataccttgataattat

SEQ ID NO: 16 - RNA, 26 nt, synthetic construct
  misc_feature 1..26: note = HBV RNAi trigger antisense strand
  source 1..26: mol_type = other RNA
tgaagcgaagtgcacacggaccgtat

SEQ ID NO: 17 - RNA, 26 nt, synthetic construct
  misc_feature 1..26: note = HBV RNAi trigger antisense strand
  source 1..26: mol_type = other RNA
taccaatttatgcctacaggccttat

SEQ ID NO: 18 - RNA, 26 nt, synthetic construct
  misc_feature 1..26: note = HBV RNAi trigger antisense strand
  source 1..26: mol_type = other RNA
tatgataaaacgccgcagacacatat

SEQ ID NO: 19 - RNA, 26 nt, synthetic construct
  misc_feature 1..26: note = HBV RNAi trigger antisense strand
  source 1..26: mol_type = other RNA
tagatgattaggcagaggttgaatat

SEQ ID NO: 20 - RNA, 21 nt, synthetic construct
  modified_base 1: mod_base = OTHER; note = thymine
  modified_base 20..21: mod_base = OTHER; note = thymine
  misc_feature 1..21: note = HBV RNAi trigger antisense strand
  modified_base 2..19: mod_base = OTHER; note = "2'-hydroxy nucleoside"
  modified_base 1: mod_base = OTHER; note = thymine
  modified_base 20: mod_base = OTHER; note = thymine
  modified_base 21: mod_base = OTHER; note = thymine
  source 1..21: mol_type = other RNA
tgataaaacgccgcagacatt

SEQ ID NO: 21 - RNA, 21 nt, synthetic construct
  modified_base 1: mod_base = OTHER; note = thymine
  modified_base 20..21: mod_base = OTHER; note = thymine
  misc_feature 1..21: note = HBV RNAi trigger antisense strand
  modified_base 2..19: mod_base = OTHER; note = "2'-hydroxy nucleoside"
  modified_base 1: mod_base = OTHER; note = thymine
  modified_base 20: mod_base = OTHER; note = thymine
  modified_base 21: mod_base = OTHER; note = thymine
  source 1..21: mol_type = other RNA
tgaacaaatggcactagtatt

SEQ ID NO: 22 - RNA, 21 nt, synthetic construct
  modified_base 1: mod_base = OTHER; note = thymine
  modified_base 20..21: mod_base = OTHER; note = thymine
  misc_feature 1..21: note = HBV RNAi trigger antisense strand
  modified_base 2..19: mod_base = OTHER; note = "2'-hydroxy nucleoside"
  modified_base 1: mod_base = OTHER; note = thymine
  modified_base 20: mod_base = OTHER; note = thymine
  modified_base 21: mod_base = OTHER; note = thymine
  source 1..21: mol_type = other RNA
tgcgtcagcaaacacttggtt

SEQ ID NO: 23 - RNA, 21 nt, synthetic construct
  modified_base 1: mod_base = OTHER; note = thymine
  modified_base 20..21: mod_base = OTHER; note = thymine
  misc_feature 1..21: note = HBV RNAi trigger antisense strand
  modified_base 2..19: mod_base = OTHER; note = "2'-hydroxy nucleoside"
  modified_base 1: mod_base = OTHER; note = thymine
  modified_base 20: mod_base = OTHER; note = thymine
  modified_base 21: mod_base = OTHER; note = thymine
  source 1..21: mol_type = other RNA
tgaaccactgaacaaatggtt

SEQ ID NO: 24 - RNA, 21 nt, synthetic construct
  modified_base 1: mod_base = OTHER; note = thymine
  modified_base 20..21: mod_base = OTHER; note = thymine
  misc_feature 1..21: note = HBV RNAi trigger antisense strand
  modified_base 2..19: mod_base = OTHER; note = "2'-hydroxy nucleoside"
  modified_base 1: mod_base = OTHER; note = thymine
  modified_base 20: mod_base = OTHER; note = thymine
  modified_base 21: mod_base = OTHER; note = thymine
  source 1..21: mol_type = other RNA
taacgggcaacataccttgtt

SEQ ID NO: 25 - RNA, 21 nt, synthetic construct
  modified_base 1: mod_base = OTHER; note = thymine
  modified_base 20..21: mod_base = OTHER; note = thymine
  misc_feature 1..21: note = HBV RNAi trigger antisense strand
  modified_base 2..19: mod_base = OTHER; note = "2'-hydroxy nucleoside"
  modified_base 1: mod_base = OTHER; note = thymine
  modified_base 20: mod_base = OTHER; note = thymine
  modified_base 21: mod_base = OTHER; note = thymine
  source 1..21: mol_type = other RNA
tactagtaaactgagccagtt

SEQ ID NO: 26 - RNA, 21 nt, synthetic construct
  modified_base 1: mod_base = OTHER; note = thymine
  modified_base 20..21: mod_base = OTHER; note = thymine
  misc_feature 1..21: note = HBV RNAi trigger antisense strand
  modified_base 2..19: mod_base = OTHER; note = "2'-hydroxy nucleoside"
  modified_base 1: mod_base = OTHER; note = thymine
  modified_base 20: mod_base = OTHER; note = thymine
  modified_base 21: mod_base = OTHER; note = thymine
  source 1..21: mol_type = other RNA
tggacaaacgggcaacatatt

SEQ ID NO: 27 - RNA, 21 nt, synthetic construct
  modified_base 1: mod_base = OTHER; note = thymine
  modified_base 20..21: mod_base = OTHER; note = thymine
  misc_feature 1..21: note = HBV RNAi trigger antisense strand
  modified_base 2..19: mod_base = OTHER; note = "2'-hydroxy nucleoside"
  modified_base 1: mod_base = OTHER; note = thymine
  modified_base 20: mod_base = OTHER; note = thymine
  modified_base 21: mod_base = OTHER; note = thymine
  source 1..21: mol_type = other RNA
tacgggcaacataccttgatt

SEQ ID NO: 28 - RNA, 21 nt, synthetic construct
  modified_base 1: mod_base = OTHER; note = thymine
  modified_base 20..21: mod_base = OTHER; note = thymine
  misc_feature 1..21: note = HBV RNAi trigger antisense strand
  modified_base 2..19: mod_base = OTHER; note = "2'-hydroxy nucleoside"
  modified_base 1: mod_base = OTHER; note = thymine
  modified_base 20: mod_base = OTHER; note = thymine
  modified_base 21: mod_base = OTHER; note = thymine
  source 1..21: mol_type = other RNA
tgaagcgaagtgcacacggtt

SEQ ID NO: 29 - RNA, 21 nt, synthetic construct
  modified_base 1: mod_base = OTHER; note = thymine
  modified_base 20..21: mod_base = OTHER; note = thymine
  misc_feature 1..21: note = HBV RNAi trigger antisense strand
  modified_base 2..19: mod_base = OTHER; note = "2'-hydroxy nucleoside"
  modified_base 1: mod_base = OTHER; note = thymine
  modified_base 20: mod_base = OTHER; note = thymine
  modified_base 21: mod_base = OTHER; note = thymine
  source 1..21: mol_type = other RNA
ttccgcgggattcagcgcctt

SEQ ID NO: 30 - RNA, 26 nt, synthetic construct
  misc_feature 1..26: note = HBV RNAi trigger antisense strand
  source 1..26: mol_type = other RNA
agtccgcgggattcagcgccgactat

SEQ ID NO: 31 - RNA, 26 nt, synthetic construct
  misc_feature 1..26: note = HBV RNAi trigger antisense strand
  source 1..26: mol_type = other RNA
ttaaagagaggtgcgcccggtggtat

SEQ ID NO: 32 - RNA, 26 nt, synthetic construct
  misc_feature 1..26: note = HBV RNAi trigger antisense strand
  source 1..26: mol_type = other RNA
taagcgaagtgcacacggtccggtat

SEQ ID NO: 33 - RNA, 26 nt, synthetic construct
  misc_feature 1..26: note = HBV RNAi trigger antisense strand
  source 1..26: mol_type = other RNA
ttgaagcgaagtgcacacggacctat

SEQ ID NO: 34 - RNA, 26 nt, synthetic construct
  misc_feature 1..26: note = HBV RNAi trigger antisense strand
  source 1..26: mol_type = other RNA
agtgaagcgaagtgcacacggactat

SEQ ID NO: 35 - RNA, 26 nt, synthetic construct
  misc_feature 1..26: note = HBV RNAi trigger antisense strand
  source 1..26: mol_type = other RNA
tagaggtgaagcgaagtgcacactat

SEQ ID NO: 36 - RNA, 26 nt, synthetic construct
  misc_feature 1..26: note = HBV RNAi trigger antisense strand
  source 1..26: mol_type = other RNA
tcagaggtgaagcgaagtgcacatat

SEQ ID NO: 37 - RNA, 26 nt, synthetic construct
  misc_feature 1..26: note = HBV RNAi trigger antisense strand
  source 1..26: mol_type = other RNA
tgcagaggtgaagcgaagtgcactat

SEQ ID NO: 38 - RNA, 26 nt, synthetic construct
  misc_feature 1..26: note = HBV RNAi trigger antisense strand
  source 1..26: mol_type = other RNA
tcggtcgttgacattgctgggagtat

SEQ ID NO: 39 - RNA, 26 nt, synthetic construct
  misc_feature 1..26: note = HBV RNAi trigger antisense strand
  source 1..26: mol_type = other RNA
tcaaggtcggtcgttgacattgctat

SEQ ID NO: 40 - RNA, 26 nt, synthetic construct
  misc_feature 1..26: note = HBV RNAi trigger antisense strand
  source 1..26: mol_type = other RNA
tgacctttaacctaatctcctcctat

SEQ ID NO: 41 - RNA, 26 nt, synthetic construct
  misc_feature 1..26: note = HBV RNAi trigger antisense strand
  source 1..26: mol_type = other RNA
atttatgcctacagcctcctaattat

SEQ ID NO: 42 - RNA, 26 nt, synthetic construct
  misc_feature 1..26: note = HBV RNAi trigger antisense strand
  source 1..26: mol_type = other RNA
aatttatgcctacagcctcctaatat

SEQ ID NO: 43 - RNA, 26 nt, synthetic construct
  misc_feature 1..26: note = HBV RNAi trigger antisense strand
  source 1..26: mol_type = other RNA
taatttatgcctacagcctcctatat

SEQ ID NO: 44 - RNA, 26 nt, synthetic construct
  misc_feature 1..26: note = HBV RNAi trigger antisense strand
  source 1..26: mol_type = other RNA
tcaatttatgcctacagcctccttat

SEQ ID NO: 45 - RNA, 26 nt, synthetic construct
  misc_feature 1..26: note = HBV RNAi trigger antisense strand
  source 1..26: mol_type = other RNA
tccaatttatgcctacagcctcctat

SEQ ID NO: 46 - RNA, 26 nt, synthetic construct
  misc_feature 1..26: note = HBV RNAi trigger antisense strand
  source 1..26: mol_type = other RNA
tacgccgcagacacatccagcgatat

SEQ ID NO: 47 - RNA, 26 nt, synthetic construct
  misc_feature 1..26: note = HBV RNAi trigger antisense strand
  source 1..26: mol_type = other RNA
taaaacgccgcagacacatccagtat

SEQ ID NO: 48 - RNA, 26 nt, synthetic construct
  misc_feature 1..26: note = HBV RNAi trigger antisense strand
  source 1..26: mol_type = other RNA
ttaaaacgccgcagacacatccatat

SEQ ID NO: 49 - RNA, 26 nt, synthetic construct
  misc_feature 1..26: note = HBV RNAi trigger antisense strand
  source 1..26: mol_type = other RNA
ttgataaaacgccgcagacacattat

SEQ ID NO: 50 - RNA, 26 nt, synthetic construct
  misc_feature 1..26: note = HBV RNAi trigger antisense strand
  source 1..26: mol_type = other RNA
taaacgggcaacataccttgatatat

SEQ ID NO: 51 - RNA, 26 nt, synthetic construct
  misc_feature 1..26: note = HBV RNAi trigger antisense strand
  source 1..26: mol_type = other RNA
tcaaacgggcaacataccttgattat

SEQ ID NO: 52 - RNA, 26 nt, synthetic construct
  misc_feature 1..26: note = HBV RNAi trigger antisense strand
  source 1..26: mol_type = other RNA
tacaaacgggcaacataccttgatat

SEQ ID NO: 53 - RNA, 26 nt, synthetic construct
  misc_feature 1..26: note = HBV RNAi trigger antisense strand
  source 1..26: mol_type = other RNA
taggacaaacgggcaacataccttat

SEQ ID NO: 54 - RNA, 26 nt, synthetic construct
  misc_feature 1..26: note = HBV RNAi trigger antisense strand
  source 1..26: mol_type = other RNA
tggcactagtaaactgagccaagtat

SEQ ID NO: 55 - RNA, 26 nt, synthetic construct
  misc_feature 1..26: note = HBV RNAi trigger antisense strand
  source 1..26: mol_type = other RNA
ttggcactagtaaactgagccaatat

SEQ ID NO: 56 - RNA, 26 nt, synthetic construct
  misc_feature 1..26: note = HBV RNAi trigger antisense strand
  source 1..26: mol_type = other RNA
taatggcactagtaaactgagcctat

SEQ ID NO: 57 - RNA, 26 nt, synthetic construct
  misc_feature 1..26: note = HBV RNAi trigger antisense strand
  source 1..26: mol_type = other RNA
taaatggcactagtaaactgagctat

SEQ ID NO: 58 - RNA, 26 nt, synthetic construct
  misc_feature 1..26: note = HBV RNAi trigger antisense strand
  source 1..26: mol_type = other RNA
tcaaatggcactagtaaactgagtat

SEQ ID NO: 59 - RNA, 26 nt, synthetic construct
  misc_feature 1..26: note = HBV RNAi trigger antisense strand
  source 1..26: mol_type = other RNA
tacaaatggcactagtaaactgatat

SEQ ID NO: 60 - RNA, 26 nt, synthetic construct
  misc_feature 1..26: note = HBV RNAi trigger antisense strand
  source 1..26: mol_type = other RNA
ttgaacaaatggcactagtaaactat

SEQ ID NO: 61 - RNA, 26 nt, synthetic construct
  misc_feature 1..26: note = HBV RNAi trigger antisense strand
  source 1..26: mol_type = other RNA
actgaacaaatggcactagtaaatat

SEQ ID NO: 62 - RNA, 26 nt, synthetic construct
  misc_feature 1..26: note = HBV RNAi trigger antisense strand
  source 1..26: mol_type = other RNA
taaccactgaacaaatggcactatat

SEQ ID NO: 63 - RNA, 26 nt, synthetic construct
  misc_feature 1..26: note = HBV RNAi trigger antisense strand
  source 1..26: mol_type = other RNA
tcgaaccactgaacaaatggcactat

SEQ ID NO: 64 - RNA, 26 nt, synthetic construct
  misc_feature 1..26: note = HBV RNAi trigger antisense strand
  source 1..26: mol_type = other RNA
tcagaggtgaaaaagttgcatggtat

SEQ ID NO: 65 - RNA, 26 nt, synthetic construct
  misc_feature 1..26: note = HBV RNAi trigger antisense strand
  source 1..26: mol_type = other RNA
tgcagaggtgaaaaagttgcatgtat

SEQ ID NO: 66 - RNA, 26 nt, synthetic construct
  misc_feature 1..26: note = HBV RNAi trigger antisense strand
  source 1..26: mol_type = other RNA
tgatgattaggcagaggtgaaaatat

SEQ ID NO: 67 - RNA, 26 nt, synthetic construct
  misc_feature 1..26: note = HBV RNAi trigger antisense strand
  source 1..26: mol_type = other RNA
tgagatgattaggcagaggtgaatat

SEQ ID NO: 68 - RNA, 26 nt, synthetic construct
  misc_feature 1..26: note = HBV RNAi trigger antisense strand
  source 1..26: mol_type = other RNA
tcacgagtctagactctgtggtatat

SEQ ID NO: 69 - RNA, 26 nt, synthetic construct
  misc_feature 1..26: note = HBV RNAi trigger antisense strand
  source 1..26: mol_type = other RNA
attgagagaagtccaccacgagttat

SEQ ID NO: 70 - RNA, 26 nt, synthetic construct
  misc_feature 1..26: note = HBV RNAi trigger antisense strand
  source 1..26: mol_type = other RNA
aattgagagaagtccaccacgagtat

SEQ ID NO: 71 - RNA, 26 nt, synthetic construct
  misc_feature 1..26: note = HBV RNAi trigger antisense strand
  source 1..26: mol_type = other RNA
ttagaaaattgagagaagtccactat

SEQ ID NO: 72 - RNA, 26 nt, synthetic construct
  misc_feature 1..26: note = HBV RNAi trigger antisense strand
  source 1..26: mol_type = other RNA
ttatggatcggcagaggagccactat

SEQ ID NO: 73 - RNA, 26 nt, synthetic construct
  misc_feature 1..26: note = HBV RNAi trigger antisense strand
  source 1..26: mol_type = other RNA
tcagtatggatcggcagaggagctat

SEQ ID NO: 74 - RNA, 26 nt, synthetic construct
  misc_feature 1..26: note = HBV RNAi trigger antisense strand
  source 1..26: mol_type = other RNA
tggagttccgcagtatggatcggtat

SEQ ID NO: 75 - RNA, 23 nt, synthetic construct
  misc_feature 1..23: note = HBV RNAi trigger antisense strand
  source 1..23: mol_type = other RNA
taccaatttatgcctacaggcct

SEQ ID NO: 76 - RNA, 21 nt, synthetic construct
  misc_feature 1..21: note = HBV RNAi trigger antisense strand
  source 1..21: mol_type = other RNA
taccaatttatgcctacaggc

SEQ ID NO: 77 - RNA, 23 nt, synthetic construct
  misc_feature 1..23: note = HBV RNAi trigger antisense strand
  source 1..23: mol_type = other RNA
tgaagcgaagtgcacacggaccg

SEQ ID NO: 78 - RNA, 21 nt, synthetic construct
  misc_feature 1..21: note = HBV RNAi trigger antisense strand
  source 1..21: mol_type = other RNA
tgaagcgaagtgcacacggac

SEQ ID NO: 79 - RNA, 23 nt, synthetic construct
  misc_feature 1..23: note = HBV RNAi trigger antisense strand
  source 1..23: mol_type = other RNA
tggacaaacgggcaacatacctt

SEQ ID NO: 80 - RNA, 21 nt, synthetic construct
  misc_feature 1..21: note = HBV RNAi trigger antisense strand
  source 1..21: mol_type = other RNA
tggacaaacgggcaacatacc

SEQ ID NO: 81 - RNA, 17 nt, synthetic construct
  modified_base 16..17: mod_base = OTHER; note = thymine
  misc_feature 1..17: note = HBV RNAi trigger antisense strand
  modified_base 1..15: mod_base = OTHER; note = "2'-hydroxy nucleoside"
  modified_base 16..17: mod_base = OTHER; note = thymine
  source 1..17: mol_type = other RNA
ataaaacgccgcagatt

SEQ ID NO: 82 - RNA, 21 nt, synthetic construct
  misc_feature 1..21: note = HBV RNAi trigger antisense strand
  source 1..21: mol_type = other RNA
tgtgaagcgaagtgcacactt

SEQ ID NO: 83 - RNA, 23 nt, synthetic construct
  misc_feature 1..23: note = HBV RNAi trigger antisense strand
  source 1..23: mol_type = other RNA
taaaattgagagaagtccaccac

SEQ ID NO: 84 - RNA, 26 nt, synthetic construct
  misc_feature 1..26: note = HBV RNAi trigger antisense strand
  source 1..26: mol_type = other RNA
ttgaagcgaagtgcacacggaccgcg

SEQ ID NO: 85 - RNA, 26 nt, synthetic construct
  misc_feature 1..26: note = HBV RNAi trigger antisense strand
  source 1..26: mol_type = other RNA
tgtgaagcgaagtgcacacggaccgc

SEQ ID NO: 86 - RNA, 26 nt, synthetic construct
  misc_feature 1..26: note = HBV RNAi trigger antisense strand
  source 1..26: mol_type = other RNA
tgataaaacgccgcagacacatccgc

SEQ ID NO: 87 - RNA, 26 nt, synthetic construct
  misc_feature 1..26: note = HBV RNAi trigger antisense strand
  source 1..26: mol_type = other RNA
tatgataaaacgccgcagacacacgc

SEQ ID NO: 88 - RNA, 26 nt, synthetic construct
  misc_feature 1..26: note = HBV RNAi trigger antisense strand
  source 1..26: mol_type = other RNA
agtgaagcgaagtgcacacggaccgc

SEQ ID NO: 89 - RNA, 26 nt, synthetic construct
  misc_feature 1..26: note = HBV RNAi trigger antisense strand
  source 1..26: mol_type = other RNA
aatgataaaacgccgcagacacacgc

SEQ ID NO: 90 - RNA, 26 nt, synthetic construct
  misc_feature 1..26: note = HBV RNAi trigger antisense strand
  source 1..26: mol_type = other RNA
tgaagcgaagtgcacacggaccgcgc

SEQ ID NO: 91 - RNA, 26 nt, synthetic construct
  misc_feature 1..26: note = HBV RNAi trigger antisense strand
  source 1..26: mol_type = other RNA
tggacaaacgggcaacataccttcgc

SEQ ID NO: 92 - RNA, 26 nt, synthetic construct
  misc_feature 1..26: note = HBV RNAi trigger antisense strand
  source 1..26: mol_type = other RNA
taccaatttatgcctacagcctccgc

SEQ ID NO: 93 - RNA, 17 nt, synthetic construct
  modified_base 16..17: mod_base = OTHER; note = thymine
  misc_feature 1..17: note = HBV RNAi trigger antisense strand
  modified_base 1..15: mod_base = OTHER; note = "2'-hydroxy nucleoside"
  modified_base 16..17: mod_base = OTHER; note = thymine
  source 1..17: mol_type = other RNA
tgattaggcagaggttt

SEQ ID NO: 94 - RNA, 17 nt, synthetic construct
  modified_base 16..17: mod_base = OTHER; note = thymine
  misc_feature 1..17: note = HBV RNAi trigger antisense strand
  modified_base 1..15: mod_base = OTHER; note = "2'-hydroxy nucleoside"
  modified_base 16..17: mod_base = OTHER; note = thymine
  source 1..17: mol_type = other RNA
aatttatgcctacagtt

SEQ ID NO: 95 - RNA, 21 nt, synthetic construct
  misc_feature 1..21: note = HBV RNAi trigger antisense strand
  source 1..21: mol_type = other RNA
taccaatttatgcctacagtt

SEQ ID NO: 96 - RNA, 21 nt, synthetic construct
  misc_feature 1..21: note = HBV RNAi trigger antisense strand
  source 1..21: mol_type = other RNA
attgagagaagtccaccacga

SEQ ID NO: 97 - RNA, 21 nt, synthetic construct
  misc_feature 1..21: note = HBV RNAi trigger antisense strand
  source 1..21: mol_type = other RNA
attgagagaagtccaccactt

SEQ ID NO: 98 - RNA, 21 nt, synthetic construct
  misc_feature 1..21: note = HBV RNAi trigger antisense strand
  source 1..21: mol_type = other RNA
tttgagagaagtccaccacga

SEQ ID NO: 99 - RNA, 21 nt, synthetic construct
  misc_feature 1..21: note = HBV RNAi trigger antisense strand
  source 1..21: mol_type = other RNA
aattgagagaagtccaccacg

SEQ ID NO: 100 - RNA, 21 nt, synthetic construct
  misc_feature 1..21: note = HBV RNAi trigger antisense strand
  source 1..21: mol_type = other RNA
aattgagagaagtccaccatt

SEQ ID NO: 101 - RNA, 21 nt, synthetic construct
  misc_feature 1..21: note = HBV RNAi trigger antisense strand
  source 1..21: mol_type = other RNA
tattgagagaagtccaccacg

SEQ ID NO: 102 - RNA, 21 nt, synthetic construct
  misc_feature 1..21: note = HBV RNAi trigger antisense strand
  source 1..21: mol_type = other RNA
ttagaaaattgagagaagtcc

SEQ ID NO: 103 - RNA, 23 nt, synthetic construct
  modified_base 23: mod_base = OTHER; note = thymine
  misc_feature 1..23: note = HBV RNAi trigger sense strand
  modified_base 1..22: mod_base = OTHER; note = "2'-hydroxy nucleoside"
  modified_base 23: mod_base = OTHER; note = thymine
  source 1..23: mol_type = other RNA
tatctgtaggcataaattggtat

SEQ ID NO: 104 - RNA, 23 nt, synthetic construct
  modified_base 23: mod_base = OTHER; note = thymine
  misc_feature 1..23: note = HBV RNAi trigger sense strand
  modified_base 1..22: mod_base = OTHER; note = "2'-hydroxy nucleoside"
  modified_base 23: mod_base = OTHER; note = thymine
  source 1..23: mol_type = other RNA
tattctgcggcgttttatcatat

SEQ ID NO: 105 - RNA, 23 nt, synthetic construct
  modified_base 23: mod_base = OTHER; note = thymine
  misc_feature 1..23: note = HBV RNAi trigger sense strand
  modified_base 1..22: mod_base = OTHER; note = "2'-hydroxy nucleoside"
  modified_base 23: mod_base = OTHER; note = thymine
  source 1..23: mol_type = other RNA
tatacctctgcctaatcatctat

SEQ ID NO: 106 - RNA, 20 nt, synthetic construct
  modified_base 20: mod_base = OTHER; note = thymine
  misc_feature 1..20: note = HBV RNAi trigger sense strand
  modified_base 1..19: mod_base = OTHER; note = "2'-hydroxy nucleoside"
  modified_base 20: mod_base = OTHER; note = thymine
  source 1..20: mol_type = other RNA
ctgtaggcataaattggtat

SEQ ID NO: 107 - RNA, 20 nt, synthetic construct
  modified_base 20: mod_base = OTHER; note = thymine
  misc_feature 1..20: note = HBV RNAi trigger sense strand
  modified_base 1..19: mod_base = OTHER; note = "2'-hydroxy nucleoside"
  modified_base 20: mod_base = OTHER; note = thymine
  source 1..20: mol_type = other RNA
acctctgcctaatcatctat

SEQ ID NO: 108 - RNA, 20 nt, synthetic construct
  modified_base 20: mod_base = OTHER; note = thymine
  misc_feature 1..20: note = HBV RNAi trigger sense strand
  modified_base 1..19: mod_base = OTHER; note = "2'-hydroxy nucleoside"
  modified_base 20: mod_base = OTHER; note = thymine
  source 1..20: mol_type = other RNA
tttactagtgccatttgtat

SEQ ID NO: 109 - RNA, 20 nt, synthetic construct
  modified_base 20: mod_base = OTHER; note = thymine
  misc_feature 1..20: note = HBV RNAi trigger sense strand
  modified_base 1..19: mod_base = OTHER; note = "2'-hydroxy nucleoside"
  modified_base 20: mod_base = OTHER; note = thymine
  source 1..20: mol_type = other RNA
tctgcggcgttttatcatat

SEQ ID NO: 110 - RNA, 23 nt, synthetic construct
  modified_base 23: mod_base = OTHER; note = thymine
  misc_feature 1..23: note = HBV RNAi trigger sense strand
  modified_base 1..22: mod_base = OTHER; note = "2'-hydroxy nucleoside"
  modified_base 23: mod_base = OTHER; note = thymine
  source 1..23: mol_type = other RNA
tattttactagtgccatttgtat

SEQ ID NO: 111 - RNA, 26 nt, synthetic construct
  misc_feature 1..26: note = HBV RNAi trigger sense strand
  source 1..26: mol_type = other RNA
tatatgcctgtaggcataaattggta

SEQ ID NO: 112 - RNA, 26 nt, synthetic construct
  misc_feature 1..26: note = HBV RNAi trigger sense strand
  source 1..26: mol_type = other RNA
tatattgtctgcggcgttttatcata

SEQ ID NO: 113 - RNA, 26 nt, synthetic construct
  misc_feature 1..26: note = HBV RNAi trigger sense strand
  source 1..26: mol_type = other RNA
tatatcaacctctgcctaatcatcta

SEQ ID NO: 114 - RNA, 26 nt, synthetic construct
  misc_feature 1..26: note = HBV RNAi trigger sense strand
  source 1..26: mol_type = other RNA
tatattgtgtctgcggcgttttatca

SEQ ID NO: 115 - RNA, 26 nt, synthetic construct
  misc_feature 1..26: note = HBV RNAi trigger sense strand
  source 1..26: mol_type = other RNA
tatattttactagtgccatttgttca

SEQ ID NO: 116 - RNA, 26 nt, synthetic construct
  misc_feature 1..26: note = HBV RNAi trigger sense strand
  source 1..26: mol_type = other RNA
tatattgccaagtgtttgctgacgca

SEQ ID NO: 117 - RNA, 26 nt, synthetic construct
  misc_feature 1..26: note = HBV RNAi trigger sense strand
  source 1..26: mol_type = other RNA
tatattgccatttgttcagtggttca

SEQ ID NO: 118 - RNA, 26 nt, synthetic construct
  misc_feature 1..26: note = HBV RNAi trigger sense strand
  source 1..26: mol_type = other RNA
tatatatcaaggtatgttgcccgtta

SEQ ID NO: 119 - RNA, 26 nt, synthetic construct
  misc_feature 1..26: note = HBV RNAi trigger sense strand
  source 1..26: mol_type = other RNA
tatattcctggctcagtttactagta

SEQ ID NO: 120 - RNA, 26 nt, synthetic construct
  misc_feature 1..26: note = HBV RNAi trigger sense strand
  source 1..26: mol_type = other RNA
tatatggtatgttgcccgtttgtcca

SEQ ID NO: 121 - RNA, 26 nt, synthetic construct
  misc_feature 1..26: note = HBV RNAi trigger sense strand
  source 1..26: mol_type = other RNA
tatattatcaaggtatgttgcccgta

SEQ ID NO: 122 - RNA, 26 nt, synthetic construct
  misc_feature 1..26: note = HBV RNAi trigger sense strand
  source 1..26: mol_type = other RNA
tatatgtccgtgtgcacttcgcttca

SEQ ID NO: 123 - RNA, 23 nt, synthetic construct
  modified_base 23: mod_base = OTHER; note = thymine
  misc_feature 1..23: note = HBV RNAi trigger sense strand
  modified_base 1..22: mod_base = OTHER; note = "2'-hydroxy nucleoside"
  modified_base 23: mod_base = OTHER; note = thymine
  source 1..23: mol_type = other RNA
tattgtctgcggcgttttatcat

SEQ ID NO: 124 - RNA, 23 nt, synthetic construct
  modified_base 23: mod_base = OTHER; note = thymine
  misc_feature 1..23: note = HBV RNAi trigger sense strand
  modified_base 1..22: mod_base = OTHER; note = "2'-hydroxy nucleoside"
  modified_base 23: mod_base = OTHER; note = thymine
  source 1..23: mol_type = other RNA
tattactagtgccatttgttcat

SEQ ID NO: 125 - RNA, 23 nt, synthetic construct
  modified_base 23: mod_base = OTHER; note = thymine
  misc_feature 1..23: note = HBV RNAi trigger sense strand
  modified_base 1..22: mod_base = OTHER; note = "2'-hydroxy nucleoside"
  modified_base 23: mod_base = OTHER; note = thymine
  source 1..23: mol_type = other RNA
tatccaagtgtttgctgacgcat

SEQ ID NO: 126 - RNA, 23 nt, synthetic construct
  modified_base 23: mod_base = OTHER; note = thymine
  misc_feature 1..23: note = HBV RNAi trigger sense strand
  modified_base 1..22: mod_base = OTHER; note = "2'-hydroxy nucleoside"
  modified_base 23: mod_base = OTHER; note = thymine
  source 1..23: mol_type = other RNA
tatccatttgttcagtggttcat

SEQ ID NO: 127 - RNA, 23 nt, synthetic construct
  modified_base 23: mod_base = OTHER; note = thymine
  misc_feature 1..23: note = HBV RNAi trigger sense strand
  modified_base 1..22: mod_base = OTHER; note = "2'-hydroxy nucleoside"
  modified_base 23: mod_base = OTHER; note = thymine
  source 1..23: mol_type = other RNA
tatcaaggtatgttgcccgttat

SEQ ID NO: 128 - RNA, 23 nt, synthetic construct
  modified_base 23: mod_base = OTHER; note = thymine
  misc_feature 1..23: note = HBV RNAi trigger sense strand
  modified_base 1..22: mod_base = OTHER; note = "2'-hydroxy nucleoside"
  modified_base 23: mod_base = OTHER; note = thymine
  source 1..23: mol_type = other RNA
tatctggctcagtttactagtat

SEQ ID NO: 129 - RNA, 23 nt, synthetic construct
  modified_base 23: mod_base = OTHER; note = thymine
  misc_feature 1..23: note = HBV RNAi trigger sense strand
  modified_base 1..22: mod_base = OTHER; note = "2'-hydroxy nucleoside"
  modified_base 23: mod_base = OTHER; note = thymine
  source 1..23: mol_type = other RNA
tattatgttgcccgtttgtccat

SEQ ID NO: 130 - RNA, 23 nt, synthetic construct
  modified_base 23: mod_base = OTHER; note = thymine
  misc_feature 1..23: note = HBV RNAi trigger sense strand
  modified_base 1..22: mod_base = OTHER; note = "2'-hydroxy nucleoside"
  modified_base 23: mod_base = OTHER; note = thymine
  source 1..23: mol_type = other RNA
tattcaaggtatgttgcccgtat

SEQ ID NO: 131 - RNA, 23 nt, synthetic construct
  modified_base 23: mod_base = OTHER; note = thymine
  misc_feature 1..23: note = HBV RNAi trigger sense strand
  modified_base 1..22: mod_base = OTHER; note = "2'-hydroxy nucleoside"
  modified_base 23: mod_base = OTHER; note = thymine
  source 1..23: mol_type = other RNA
tatccgtgtgcacttcgcttcat

SEQ ID NO: 132 - RNA, 23 nt, synthetic construct
  modified_base 23: mod_base = OTHER; note = thymine
  misc_feature 1..23: note = HBV RNAi trigger sense strand
  modified_base 1..22: mod_base = OTHER; note = "2'-hydroxy nucleoside"
  modified_base 23: mod_base = OTHER; note = thymine
  source 1..23: mol_type = other RNA
tatggcgctgaatcccgcggaat

SEQ ID NO: 133 - RNA, 26 nt, synthetic construct
  modified_base 26: mod_base = OTHER; note = thymine
  misc_feature 1..26: note = HBV RNAi trigger sense strand
  modified_base 1..25: mod_base = OTHER; note = "2'-hydroxy nucleoside"
  modified_base 26: mod_base = OTHER; note = thymine
  source 1..26: mol_type = other RNA
tatatcggcgctgaatcccgcggact

SEQ ID NO: 134 - RNA, 26 nt, synthetic construct
  misc_feature 1..26: note = HBV RNAi trigger sense strand
  source 1..26: mol_type = other RNA
tatataccgggcgcacctctctttaa

SEQ ID NO: 135 - RNA, 26 nt, synthetic construct
  misc_feature 1..26: note = HBV RNAi trigger sense strand
  source 1..26: mol_type = other RNA
tatatggaccgtgtgcacttcgctta

SEQ ID NO: 136 - RNA, 26 nt, synthetic construct
  misc_feature 1..26: note = HBV RNAi trigger sense strand
  source 1..26: mol_type = other RNA
tatattccgtgtgcacttcgcttcaa

SEQ ID NO: 137 - RNA, 26 nt, synthetic construct
  modified_base 26: mod_base = OTHER; note = thymine
  misc_feature 1..26: note = HBV RNAi trigger sense strand
  modified_base 1..25: mod_base = OTHER; note = "2'-hydroxy nucleoside"
  modified_base 26: mod_base = OTHER; note = thymine
  source 1..26: mol_type = other RNA
tatatccgtgtgcacttcgcttcact

SEQ ID NO: 138 - RNA, 26 nt, synthetic construct
  misc_feature 1..26: note = HBV RNAi trigger sense strand
  source 1..26: mol_type = other RNA
tatatgtgcacttcgcttcacctcta

SEQ ID NO: 139 - RNA, 26 nt, synthetic construct
  misc_feature 1..26: note = HBV RNAi trigger sense strand
  source 1..26: mol_type = other RNA
tatattgcacttcgcttcacctctga

SEQ ID NO: 140 - RNA, 26 nt, synthetic construct
  misc_feature 1..26: note = HBV RNAi trigger sense strand
  source 1..26: mol_type = other RNA
tatatgcacttcgcttcacctctgca

SEQ ID NO: 141 - RNA, 26 nt, synthetic construct
  misc_feature 1..26: note = HBV RNAi trigger sense strand
  source 1..26: mol_type = other RNA
tatatcccagcaatgtcaacgaccga

SEQ ID NO: 142 - RNA, 26 nt, synthetic construct
  misc_feature 1..26: note = HBV RNAi trigger sense strand
  source 1..26: mol_type = other RNA
tatataatgtcaacgaccgaccttga

SEQ ID NO: 143 - RNA, 26 nt, synthetic construct
  misc_feature 1..26: note = HBV RNAi trigger sense strand
  source 1..26: mol_type = other RNA
tatataggagattaggttaaaggtca

SEQ ID NO: 144 - RNA, 26 nt, synthetic construct
  modified_base 26: mod_base = OTHER; note = thymine
  misc_feature 1..26: note = HBV RNAi trigger sense strand
  modified_base 1..25: mod_base = OTHER; note = "2'-hydroxy nucleoside"
  modified_base 26: mod_base = OTHER; note = thymine
  source 1..26: mol_type = other RNA
tatattaggaggctgtaggcataaat

SEQ ID NO: 145 - RNA, 26 nt, synthetic construct
  modified_base 26: mod_base = OTHER; note = thymine
  misc_feature 1..26: note = HBV RNAi trigger sense strand
  modified_base 1..25: mod_base = OTHER; note = "2'-hydroxy nucleoside"
  modified_base 26: mod_base = OTHER; note = thymine
  source 1..26: mol_type = other RNA
tatataggaggctgtaggcataaatt

SEQ ID NO: 146 - RNA, 26 nt, synthetic construct
  misc_feature 1..26: note = HBV RNAi trigger sense strand
  source 1..26: mol_type = other RNA
tatatggaggctgtaggcataaatta

SEQ ID NO: 147 - RNA, 26 nt, synthetic construct
  misc_feature 1..26: note = HBV RNAi trigger sense strand
  source 1..26: mol_type = other RNA
tatatgaggctgtaggcataaattga

SEQ ID NO: 148 - RNA, 26 nt, synthetic construct
  misc_feature 1..26: note = HBV RNAi trigger sense strand
  source 1..26: mol_type = other RNA
tatataggctgtaggcataaattgga

SEQ ID NO: 149 - RNA, 26 nt, synthetic construct
  misc_feature 1..26: note = HBV RNAi trigger sense strand
  source 1..26: mol_type = other RNA
tatatgctggatgtgtctgcggcgta

SEQ ID NO: 150 - RNA, 26 nt, synthetic construct
  misc_feature 1..26: note = HBV RNAi trigger sense strand
  source 1..26: mol_type = other RNA
tatatggatgtgtctgcggcgtttta

SEQ ID NO: 151 - RNA, 26 nt, synthetic construct
  misc_feature 1..26: note = HBV RNAi trigger sense strand
  source 1..26: mol_type = other RNA
tatatgatgtgtctgcggcgttttaa

SEQ ID NO: 152 - RNA, 26 nt, synthetic construct
  misc_feature 1..26: note = HBV RNAi trigger sense strand
  source 1..26: mol_type = other RNA
tatatgtgtctgcggcgttttatcaa

SEQ ID NO: 153 - RNA, 26 nt, synthetic construct
  misc_feature 1..26: note = HBV RNAi trigger sense strand
  source 1..26: mol_type = other RNA
tatattcaaggtatgttgcccgttta

SEQ ID NO: 154 - RNA, 26 nt, synthetic construct
  misc_feature 1..26: note = HBV RNAi trigger sense strand
  source 1..26: mol_type = other RNA
tatatcaaggtatgttgcccgtttga

SEQ ID NO: 155 - RNA, 26 nt, synthetic construct
  misc_feature 1..26: note = HBV RNAi trigger sense strand
  source 1..26: mol_type = other RNA
tatataaggtatgttgcccgtttgta

SEQ ID NO: 156 - RNA, 26 nt, synthetic construct
  misc_feature 1..26: note = HBV RNAi trigger sense strand
  source 1..26: mol_type = other RNA
tatatgtatgttgcccgtttgtccta

SEQ ID NO: 157 - RNA, 26 nt, synthetic construct
  misc_feature 1..26: note = HBV RNAi trigger sense strand
  source 1..26: mol_type = other RNA
tatattggctcagtttactagtgcca

SEQ ID NO: 158 - RNA, 26 nt, synthetic construct
  misc_feature 1..26: note = HBV RNAi trigger sense strand
  source 1..26: mol_type = other RNA
tatatggctcagtttactagtgccaa

SEQ ID NO: 159 - RNA, 26 nt, synthetic construct
  misc_feature 1..26: note = HBV RNAi trigger sense strand
  source 1..26: mol_type = other RNA
tatatctcagtttactagtgccatta

SEQ ID NO: 160 - RNA, 26 nt, synthetic construct
  misc_feature 1..26: note = HBV RNAi trigger sense strand
  source 1..26: mol_type = other RNA
tatattcagtttactagtgccattta

SEQ ID NO: 161 - RNA, 26 nt, synthetic construct
  misc_feature 1..26: note = HBV RNAi trigger sense strand
  source 1..26: mol_type = other RNA
tatatcagtttactagtgccatttga

SEQ ID NO: 162 - RNA, 26 nt, synthetic construct
  misc_feature 1..26: note = HBV RNAi trigger sense strand
  source 1..26: mol_type = other RNA
tatatagtttactagtgccatttgta

SEQ ID NO: 163 - RNA, 26 nt, synthetic construct
  misc_feature 1..26: note = HBV RNAi trigger sense strand
  source 1..26: mol_type = other RNA
tatatttactagtgccatttgttcaa

SEQ ID NO: 164 - RNA, 26 nt, synthetic construct
  modified_base 26: mod_base = OTHER; note = thymine
  misc_feature 1..26: note = HBV RNAi trigger sense strand
  modified_base 1..25: mod_base = OTHER; note = "2'-hydroxy nucleoside"
  modified_base 26: mod_base = OTHER; note = thymine
  source 1..26: mol_type = other RNA
tatattactagtgccatttgttcagt

SEQ ID NO: 165 - RNA, 26 nt, synthetic construct
  misc_feature 1..26: note = HBV RNAi trigger sense strand
  source 1..26: mol_type = other RNA
tatatgtgccatttgttcagtggtta

SEQ ID NO: 166 - RNA, 21 nt, synthetic construct
  misc_feature 1..21: note = HBV RNAi trigger sense strand
  source 1..21: mol_type = other RNA
ggtggacttctctcaatttta

SEQ ID NO: 167 - RNA, 26 nt, synthetic construct
  misc_feature 1..26: note = HBV RNAi trigger sense strand
  source 1..26: mol_type = other RNA
tatatgccatttgttcagtggttcga

SEQ ID NO: 168 - RNA, 26 nt, synthetic construct
  misc_feature 1..26: note = HBV RNAi trigger sense strand
  source 1..26: mol_type = other RNA
tatatatgcaactttttcacctctga

SEQ ID NO: 169 - RNA, 26 nt, synthetic construct
  misc_feature 1..26: note = HBV RNAi trigger sense strand
  source 1..26: mol_type = other RNA
tatattgcaactttttcacctctgca

SEQ ID NO: 170 - RNA, 26 nt, synthetic construct
  misc_feature 1..26: note = HBV RNAi trigger sense strand
  source 1..26: mol_type = other RNA
tatatttcacctctgcctaatcatca

SEQ ID NO: 171 - RNA, 26 nt, synthetic construct
  misc_feature 1..26: note = HBV RNAi trigger sense strand
  source 1..26: mol_type = other RNA
tatatcacctctgcctaatcatctca

SEQ ID NO: 172 - RNA, 26 nt, synthetic construct
  misc_feature 1..26: note = HBV RNAi trigger sense strand
  source 1..26: mol_type = other RNA
tatatccacagagtctagactcgtga

SEQ ID NO: 173 - RNA, 26 nt, synthetic construct
  modified_base 26: mod_base = OTHER; note = thymine
  misc_feature 1..26: note = HBV RNAi trigger sense strand
  modified_base 1..25: mod_base = OTHER; note = "2'-hydroxy nucleoside"
  modified_base 26: mod_base = OTHER; note = thymine
  source 1..26: mol_type = other RNA
tatattcgtggtggacttctctcaat

SEQ ID NO: 174 - RNA, 26 nt, synthetic construct
  modified_base 26: mod_base = OTHER; note = thymine
  misc_feature 1..26: note = HBV RNAi trigger sense strand
  modified_base 1..25: mod_base = OTHER; note = "2'-hydroxy nucleoside"
  modified_base 26: mod_base = OTHER; note = thymine
  source 1..26: mol_type = other RNA
tatatcgtggtggacttctctcaatt

SEQ ID NO: 175 - RNA, 26 nt, synthetic construct
  misc_feature 1..26: note = HBV RNAi trigger sense strand
  source 1..26: mol_type = other RNA
tatatggacttctctcaattttctaa

SEQ ID NO: 176 - RNA, 26 nt, synthetic construct
  misc_feature 1..26: note = HBV RNAi trigger sense strand
  source 1..26: mol_type = other RNA
tatatggctcctctgccgatccataa

SEQ ID NO: 177 - RNA, 26 nt, synthetic construct
  misc_feature 1..26: note = HBV RNAi trigger sense strand
  source 1..26: mol_type = other RNA
tatattcctctgccgatccatactga

SEQ ID NO: 178 - RNA, 26 nt, synthetic construct
  misc_feature 1..26: note = HBV RNAi trigger sense strand
  source 1..26: mol_type = other RNA
tatatgatccatactgcggaactcca

SEQ ID NO: 179 - RNA, 25 nt, synthetic construct
  modified_base 25: mod_base = OTHER; note = thymine
  misc_feature 1..25: note = HBV RNAi trigger sense strand
  modified_base 1..25: mod_base = OTHER; note = "2'-hydroxy nucleoside"
  modified_base 25: mod_base = OTHER; note = thymine
  source 1..25: mol_type = other RNA
ttgcctgtaggcataaattggtatt

SEQ ID NO: 180 - RNA, 25 nt, synthetic construct
  modified_base 25: mod_base = OTHER; note = thymine
  misc_feature 1..25: note = HBV RNAi trigger sense strand
  modified_base 1..25: mod_base = OTHER; note = "2'-hydroxy nucleoside"
  modified_base 25: mod_base = OTHER; note = thymine
  source 1..25: mol_type = other RNA
ttgtccgtgtgcacttcgcttcatt

SEQ ID NO: 181 - RNA, 25 nt, synthetic construct
  modified_base 25: mod_base = OTHER; note = thymine
  misc_feature 1..25: note = HBV RNAi trigger sense strand
  modified_base 1..25: mod_base = OTHER; note = "2'-hydroxy nucleoside"
  modified_base 25: mod_base = OTHER; note = thymine
  source 1..25: mol_type = other RNA
ttggtatgttgcccgtttgtccatt

SEQ ID NO: 182 - RNA, 19 nt, synthetic construct
  misc_feature 1..19: note = HBV RNAi trigger sense strand
  source 1..19: mol_type = other RNA
gtgtgcacttcgcttcaca

SEQ ID NO: 183 - RNA, 21 nt, synthetic construct
  modified_base 20: mod_base = OTHER; note = thymine
  misc_feature 1..21: note = HBV RNAi trigger sense strand
  modified_base 1..19: mod_base = OTHER; note = "2'-hydroxy nucleoside"
  modified_base 21: mod_base = OTHER; note = "2'-hydroxy nucleoside"
  modified_base 20: mod_base = OTHER; note = thymine
  source 1..21: mol_type = other RNA
ggtggacttctctcaatttta

SEQ ID NO: 184 - RNA, 26 nt, synthetic construct
  misc_feature 1..26: note = HBV RNAi trigger sense strand
  source 1..26: mol_type = other RNA
cgcggtccgtgtgcacttcgcttcaa

SEQ ID NO: 185 - RNA, 26 nt, synthetic construct
  misc_feature 1..26: note = HBV RNAi trigger sense strand
  source 1..26: mol_type = other RNA
gcggtccgtgtgcacttcgcttcaca

SEQ ID NO: 186 - RNA, 26 nt, synthetic construct
  misc_feature 1..26: note = HBV RNAi trigger sense strand
  source 1..26: mol_type = other RNA
gcggatgtgtctgcggcgttttatca

SEQ ID NO: 187 - RNA, 26 nt, synthetic construct
  modified_base 25: mod_base = OTHER; note = thymine
  misc_feature 1..26: note = HBV RNAi trigger sense strand
  modified_base 1..24: mod_base = OTHER; note = "2'-hydroxy nucleoside"
  modified_base 26: mod_base = OTHER; note = "2'-hydroxy nucleoside"
  modified_base 25: mod_base = OTHER; note = thymine
  source 1..26: mol_type = other RNA
gcgtgtgtctgcggcgttttatcata

SEQ ID NO: 188 - RNA, 26 nt, synthetic construct
  modified_base 26: mod_base = OTHER; note = thymine
  misc_feature 1..26: note = HBV RNAi trigger sense strand
  modified_base 1..25: mod_base = OTHER; note = "2'-hydroxy nucleoside"
  modified_base 26: mod_base = OTHER; note = thymine
  source 1..26: mol_type = other RNA
gcggtccgtgtgcacttcgcttcact

SEQ ID NO: 189 - RNA, 26 nt, synthetic construct
  modified_base 25..26: mod_base = OTHER; note = thymine
  misc_feature 1..26: note = HBV RNAi trigger sense strand
  modified_base 1..24: mod_base = OTHER; note = "2'-hydroxy nucleoside"
  modified_base 25..26: mod_base = OTHER; note = thymine
  source 1..26: mol_type = other RNA
gcgtgtgtctgcggcgttttatcatt

SEQ ID NO: 190 - RNA, 26 nt, synthetic construct
  misc_feature 1..26: note = HBV RNAi trigger sense strand
  source 1..26: mol_type = other RNA
gcgcggtccgtgtgcacttcgcttca

SEQ ID NO: 191 - RNA, 26 nt, synthetic construct
  misc_feature 1..26: note = HBV RNAi trigger sense strand
  source 1..26: mol_type = other RNA
gcgaaggtatgttgcccgtttgtcca

SEQ ID NO: 192 - RNA, 26 nt, synthetic construct
  modified_base 25: mod_base = OTHER; note = thymine
  misc_feature 1..26: note = HBV RNAi trigger sense strand
  modified_base 1..24: mod_base = OTHER; note = "2'-hydroxy nucleoside"
  modified_base 26: mod_base = OTHER; note = "2'-hydroxy nucleoside"
  modified_base 25: mod_base = OTHER; note = thymine
  source 1..26: mol_type = other RNA
gcggaggctgtaggcataaattggta

SEQ ID NO: 193 - RNA, 19 nt, synthetic construct
  modified_base 19: mod_base = OTHER; note = thymine
  misc_feature 1..19: note = HBV RNAi trigger sense strand
  modified_base 1..18: mod_base = OTHER; note = "2'-hydroxy nucleoside"
  modified_base 19: mod_base = OTHER; note = thymine
  source 1..19: mol_type = other RNA
tgtaggcataaattggtat

SEQ ID NO: 194 - RNA, 19 nt, synthetic construct
  modified_base 19: mod_base = OTHER; note = thymine
  misc_feature 1..19: note = HBV RNAi trigger sense strand
  modified_base 1..18: mod_base = OTHER; note = "2'-hydroxy nucleoside"
  modified_base 19: mod_base = OTHER; note = thymine
  source 1..19: mol_type = other RNA
cctctgcctaatcatctat

SEQ ID NO: 195 - RNA, 19 nt, synthetic construct
  modified_base 19: mod_base = OTHER; note = thymine
  misc_feature 1..19: note = HBV RNAi trigger sense strand
  modified_base 1..18: mod_base = OTHER; note = "2'-hydroxy nucleoside"
  modified_base 19: mod_base = OTHER; note = thymine
  source 1..19: mol_type = other RNA
ctgcggcgttttatcatat

SEQ ID NO: 196 - RNA, 22 nt, synthetic construct
  misc_feature 1..22: note = HBV RNAi trigger sense strand
  modified_base 22: mod_base = OTHER; note = "abasic site"
  source 1..22: mol_type = other RNA
ctgtaggcataaattggtattn

SEQ ID NO: 197 - RNA, 22 nt, synthetic construct
  misc_feature 1..22: note = HBV RNAi trigger sense strand
  modified_base 22: mod_base = OTHER; note = "abasic site"
  source 1..22: mol_type = other RNA
gcctgtaggcataaattggtan

SEQ ID NO: 198 - RNA, 21 nt, synthetic construct
  misc_feature 1..21: note = HBV RNAi trigger sense strand
  source 1..21: mol_type = other RNA
gcctgtaggcataaattggta

SEQ ID NO: 199 - RNA, 22 nt, synthetic construct
  modified_base 20: mod_base = OTHER; note = thymine
  misc_feature 1..22: note = HBV RNAi trigger sense strand
  modified_base 1..19: mod_base = OTHER; note = "2'-hydroxy nucleoside"
  modified_base 21: mod_base = OTHER; note = "2'-hydroxy nucleoside"
  modified_base 20: mod_base = OTHER; note = thymine
  modified_base 22: mod_base = OTHER; note = "abasic site"
  source 1..22: mol_type = other RNA
gcctgtaggcataaattggtan

SEQ ID NO: 200 - RNA, 22 nt, synthetic construct
  misc_feature 1..22: note = HBV RNAi trigger sense strand
  modified_base 22: mod_base = OTHER; note = "abasic site"
  source 1..22: mol_type = other RNA
aactgtaggcataaattggtan

SEQ ID NO: 201 - RNA, 22 nt, synthetic construct
  misc_feature 1..22: note = HBV RNAi trigger sense strand
  modified_base 22: mod_base = OTHER; note = "abasic site"
  source 1..22: mol_type = other RNA
tcgtggtggacttctctcaatn

SEQ ID NO: 202 - RNA, 22 nt, synthetic construct
  misc_feature 1..22: note = HBV RNAi trigger sense strand
  modified_base 22: mod_base = OTHER; note = "abasic site"
  source 1..22: mol_type = other RNA
aagtggtggacttctctcaatn

SEQ ID NO: 203 - RNA, 22 nt, synthetic construct
  modified_base 21: mod_base = OTHER; note = thymine
  misc_feature 1..22: note = HBV RNAi trigger sense strand
  modified_base 1..20: mod_base = OTHER; note = "2'-hydroxy nucleoside"
  modified_base 22: mod_base = OTHER; note = "abasic site"
  modified_base 21: mod_base = OTHER; note = thymine
  source 1..22: mol_type = other RNA
tcgtggtggacttctctcaatn

SEQ ID NO: 204 - RNA, 22 nt, synthetic construct
  misc_feature 1..22: note = HBV RNAi trigger sense strand
  modified_base 22: mod_base = OTHER; note = "abasic site"
  source 1..22: mol_type = other RNA
cgtggtggacttctctcaattn

SEQ ID NO: 205 - RNA, 22 nt, synthetic construct
  misc_feature 1..22: note = HBV RNAi trigger sense strand
  modified_base 22: mod_base = OTHER; note = "abasic site"
  source 1..22: mol_type = other RNA
aatggtggacttctctcaattn

SEQ ID NO: 206 - RNA, 22 nt, synthetic construct
  modified_base 20..21: mod_base = OTHER; note = thymine
  misc_feature 1..22: note = HBV RNAi trigger sense strand
  modified_base 1..19: mod_base = OTHER; note = "2'-hydroxy nucleoside"
  modified_base 22: mod_base = OTHER; note = "abasic site"
  modified_base 20..21: mod_base = OTHER; note = thymine
  source 1..22: mol_type = other RNA
cgtggtggacttctctcaattn

SEQ ID NO: 207 - RNA, 22 nt, synthetic construct
  misc_feature 1..22: note = HBV RNAi trigger sense strand
  modified_base 22: mod_base = OTHER; note = "abasic site"
  source 1..22: mol_type = other RNA
ggacttctctcaattttctaan

SEQ ID NO: 208 - RNA, 22 nt, synthetic construct
  misc_feature 1..22: note = HBV RNAi trigger sense strand
  modified_base 22: mod_base = OTHER; note = "abasic site"
  source 1..22: mol_type = other RNA
cgtggtggacttctctcaatan

SEQ ID NO: 209 - RNA, 22 nt, synthetic construct
  misc_feature 1..22: note = HBV RNAi trigger sense strand
  modified_base 22: mod_base = OTHER; note = "abasic site"
  source 1..22: mol_type = other RNA
tcgtggtggacttctctcaaan

SEQ ID NO: 210 - RNA, 21 nt, synthetic construct
  modified_base 1: mod_base = OTHER; note = thymine
  modified_base 20..21: mod_base = OTHER; note = thymine
  misc_feature 1..21: note = HBV RNAi trigger antisense strand
  modified_base 2: mod_base = OTHER; note = "2'-deoxy-3'-fluoro nucleoside"
  modified_base 4: mod_base = OTHER; note = "2'-deoxy-3'-fluoro nucleoside"
  modified_base 6: mod_base = OTHER; note = "2'-deoxy-3'-fluoro nucleoside"
  modified_base 8: mod_base = OTHER; note = "2'-deoxy-3'-fluoro nucleoside"
  modified_base 10: mod_base = OTHER; note = "2'-deoxy-3'-fluoro nucleoside"
  modified_base 12: mod_base = OTHER; note = "2'-deoxy-3'-fluoro nucleoside"
  modified_base 14: mod_base = OTHER; note = "2'-deoxy-3'-fluoro nucleoside"
  modified_base 16: mod_base = OTHER; note = "2'-deoxy-3'-fluoro nucleoside"
  modified_base 18: mod_base = OTHER; note = "2'-deoxy-3'-fluoro nucleoside"
  modified_base 3: mod_base = OTHER; note = "2'-O-Methyl nucleoside"
  modified_base 5: mod_base = OTHER; note = "2'-O-Methyl nucleoside"
  modified_base 7: mod_base = OTHER; note = "2'-O-Methyl nucleoside"
  modified_base 9: mod_base = OTHER; note = "2'-O-Methyl nucleoside"
  modified_base 11: mod_base = OTHER; note = "2'-O-Methyl nucleoside"
  modified_base 13: mod_base = OTHER; note = "2'-O-Methyl nucleoside"
  modified_base 15: mod_base = OTHER; note = "2'-O-Methyl nucleoside"
  modified_base 17: mod_base = OTHER; note = "2'-O-Methyl nucleoside"
  modified_base 19: mod_base = OTHER; note = "2'-O-Methyl nucleoside"
  modified_base 21: mod_base = OTHER; note = "phosphorothioate linked nucleoside"
  modified_base 1: mod_base = OTHER; note = thymine
  modified_base 20: mod_base = OTHER; note = thymine
  modified_base 21: mod_base = OTHER; note = thymine
  source 1..21: mol_type = other RNA
taccaatttatgcctacagtt

SEQ ID NO: 211 - RNA, 21 nt, synthetic construct
  modified_base 1: mod_base = OTHER; note = thymine
  modified_base 20..21: mod_base = OTHER; note = thymine
  misc_feature 1..21: note = HBV RNAi trigger antisense strand
  modified_base 2: mod_base = OTHER; note = "2'-deoxy-3'-fluoro nucleoside"
  modified_base 4: mod_base = OTHER; note = "2'-deoxy-3'-fluoro nucleoside"
  modified_base 6: mod_base = OTHER; note = "2'-deoxy-3'-fluoro nucleoside"
  modified_base 8: mod_base = OTHER; note = "2'-deoxy-3'-fluoro nucleoside"
  modified_base 10: mod_base = OTHER; note = "2'-deoxy-3'-fluoro nucleoside"
  modified_base 12: mod_base = OTHER; note = "2'-deoxy-3'-fluoro nucleoside"
  modified_base 14: mod_base = OTHER; note = "2'-deoxy-3'-fluoro nucleoside"
  modified_base 16: mod_base = OTHER; note = "2'-deoxy-3'-fluoro nucleoside"
  modified_base 18: mod_base = OTHER; note = "2'-deoxy-3'-fluoro nucleoside"
  modified_base 3: mod_base = OTHER; note = "2'-O-Methyl nucleoside"
  modified_base 5: mod_base = OTHER; note = "2'-O-Methyl nucleoside"
  modified_base 7: mod_base = OTHER; note = "2'-O-Methyl nucleoside"
  modified_base 9: mod_base = OTHER; note = "2'-O-Methyl nucleoside"
  modified_base 11: mod_base = OTHER; note = "2'-O-Methyl nucleoside"
  modified_base 13: mod_base = OTHER; note = "2'-O-Methyl nucleoside"
  modified_base 15: mod_base = OTHER; note = "2'-O-Methyl nucleoside"
  modified_base 17: mod_base = OTHER; note = "2'-O-Methyl nucleoside"
  modified_base 19: mod_base = OTHER; note = "2'-O-Methyl nucleoside"
  modified_base 21: mod_base = OTHER; note = "phosphorothioate linked nucleoside"
  modified_base 1: mod_base = OTHER; note = thymine
  modified_base 20: mod_base = OTHER; note = thymine
  modified_base 21: mod_base = OTHER; note = thymine
  source 1..21: mol_type = other RNA
tatgataaaacgccgcagatt

SEQ ID NO: 212 - RNA, 21 nt, synthetic construct
  modified_base 1: mod_base = OTHER; note = thymine
  modified_base 20..21: mod_base = OTHER; note = thymine
  misc_feature 1..21: note = HBV RNAi trigger antisense strand
  modified_base 2: mod_base = OTHER; note = "2'-deoxy-3'-fluoro nucleoside"
  modified_base 4: mod_base = OTHER; note = "2'-deoxy-3'-fluoro nucleoside"
  modified_base 6: mod_base = OTHER; note = "2'-deoxy-3'-fluoro nucleoside"
  modified_base 8: mod_base = OTHER; note = "2'-deoxy-3'-fluoro nucleoside"
  modified_base 10: mod_base = OTHER; note = "2'-deoxy-3'-fluoro nucleoside"
  modified_base 12: mod_base = OTHER; note = "2'-deoxy-3'-fluoro nucleoside"
  modified_base 14: mod_base = OTHER; note = "2'-deoxy-3'-fluoro nucleoside"
  modified_base 16: mod_base = OTHER; note = "2'-deoxy-3'-fluoro nucleoside"
  modified_base 18: mod_base = OTHER; note = "2'-deoxy-3'-fluoro nucleoside"
  modified_base 3: mod_base = OTHER; note = "2'-O-Methyl nucleoside"
  modified_base 5: mod_base = OTHER; note = "2'-O-Methyl nucleoside"
  modified_base 7: mod_base = OTHER; note = "2'-O-Methyl nucleoside"
  modified_base 9: mod_base = OTHER; note = "2'-O-Methyl nucleoside"
  modified_base 11: mod_base = OTHER; note = "2'-O-Methyl nucleoside"
  modified_base 13: mod_base = OTHER; note = "2'-O-Methyl nucleoside"
  modified_base 15: mod_base = OTHER; note = "2'-O-Methyl nucleoside"
  modified_base 17: mod_base = OTHER; note = "2'-O-Methyl nucleoside"
  modified_base 19: mod_base = OTHER; note = "2'-O-Methyl nucleoside"
  modified_base 21: mod_base = OTHER; note = "phosphorothioate linked nucleoside"
  modified_base 1: mod_base = OTHER; note = thymine
  modified_base 20: mod_base = OTHER; note = thymine
  modified_base 21: mod_base = OTHER; note = thymine
  source 1..21: mol_type = other RNA
tagatgattaggcagaggttt

SEQ ID NO: 213 - RNA, 21 nt, synthetic construct
  modified_base 1: mod_base = OTHER; note = thymine
  modified_base 20..21: mod_base = OTHER; note = thymine
  misc_feature 1..21: note = HBV RNAi trigger antisense strand
  modified_base 2: mod_base = OTHER; note = "2'-deoxy-3'-fluoro nucleoside"
  modified_base 4: mod_base = OTHER; note = "2'-deoxy-3'-fluoro nucleoside"
  modified_base 6: mod_base = OTHER; note = "2'-deoxy-3'-fluoro nucleoside"
  modified_base 8: mod_base = OTHER; note = "2'-deoxy-3'-fluoro nucleoside"
  modified_base 10: mod_base = OTHER; note = "2'-deoxy-3'-fluoro nucleoside"
  modified_base 12: mod_base = OTHER; note = "2'-deoxy-3'-fluoro nucleoside"
  modified_base 14: mod_base = OTHER; note = "2'-deoxy-3'-fluoro nucleoside"
  modified_base 16: mod_base = OTHER; note = "2'-deoxy-3'-fluoro nucleoside"
  modified_base 18: mod_base = OTHER; note = "2'-deoxy-3'-fluoro nucleoside"
  modified_base 3: mod_base = OTHER; note = "2'-O-Methyl nucleoside"
  modified_base 5: mod_base = OTHER; note = "2'-O-Methyl nucleoside"
  modified_base 7: mod_base = OTHER; note = "2'-O-Methyl nucleoside"
  modified_base 9: mod_base = OTHER; note = "2'-O-Methyl nucleoside"
  modified_base 11: mod_base = OTHER; note = "2'-O-Methyl nucleoside"
  modified_base 13: mod_base = OTHER; note = "2'-O-Methyl nucleoside"
  modified_base 15: mod_base = OTHER; note = "2'-O-Methyl nucleoside"
  modified_base 17: mod_base = OTHER; note = "2'-O-Methyl nucleoside"
  modified_base 19: mod_base = OTHER; note = "2'-O-Methyl nucleoside"
  modified_base 21: mod_base = OTHER; note = "phosphorothioate linked nucleoside"
  modified_base 1: mod_base = OTHER; note = thymine
  modified_base 20: mod_base = OTHER; note = thymine
  modified_base 21: mod_base = OTHER; note = thymine
  source 1..21: mol_type = other RNA
tacaaatggcactagtaaatt

SEQ ID NO: 214 - RNA, 21 nt, synthetic construct
  modified_base 1: mod_base = OTHER; note = thymine
  modified_base 20..21: mod_base = OTHER; note = thymine
  misc_feature 1..21: note = HBV RNAi trigger antisense strand
  modified_base 6: mod_base = OTHER; note = "2'-3' seco nucleoside"
  modified_base 2: mod_base = OTHER; note = "2'-deoxy-3'-fluoro nucleoside"
  modified_base 4: mod_base = OTHER; note = "2'-deoxy-3'-fluoro nucleoside"
  modified_base 8: mod_base = OTHER; note = "2'-deoxy-3'-fluoro nucleoside"
  modified_base 10: mod_base = OTHER; note = "2'-deoxy-3'-fluoro nucleoside"
  modified_base 12: mod_base = OTHER; note = "2'-deoxy-3'-fluoro nucleoside"
  modified_base 14: mod_base = OTHER; note = "2'-deoxy-3'-fluoro nucleoside"
  modified_base 16: mod_base = OTHER; note = "2'-deoxy-3'-fluoro nucleoside"
  modified_base 18: mod_base = OTHER; note = "2'-deoxy-3'-fluoro nucleoside"
  modified_base 3: mod_base = OTHER; note = "2'-O-Methyl nucleoside"
  modified_base 5: mod_base = OTHER; note = "2'-O-Methyl nucleoside"
  modified_base 7: mod_base = OTHER; note = "2'-O-Methyl nucleoside"
  modified_base 9: mod_base = OTHER; note = "2'-O-Methyl nucleoside"
  modified_base 11: mod_base = OTHER; note = "2'-O-Methyl nucleoside"
  modified_base 13: mod_base = OTHER; note = "2'-O-Methyl nucleoside"
  modified_base 15: mod_base = OTHER; note = "2'-O-Methyl nucleoside"
  modified_base 17: mod_base = OTHER; note = "2'-O-Methyl nucleoside"
  modified_base 19: mod_base = OTHER; note = "2'-O-Methyl nucleoside"
  modified_base 21: mod_base = OTHER; note = "phosphorothioate linked nucleoside"
  modified_base 1: mod_base = OTHER; note = thymine
  modified_base 20: mod_base = OTHER; note = thymine
  modified_base 21: mod_base = OTHER; note = thymine
  source 1..21: mol_type = other RNA
taccaatttatgcctacagtt

SEQ ID NO: 215 - RNA, 21 nt, synthetic construct
  modified_base 1: mod_base = OTHER; note = thymine
  modified_base 20..21: mod_base = OTHER; note = thymine
  misc_feature 1..21: note = HBV RNAi trigger antisense strand
  modified_base 7: mod_base = OTHER; note = "2'-3' seco nucleoside"
  modified_base 2: mod_base = OTHER; note = "2'-deoxy-3'-fluoro nucleoside"
  modified_base 4: mod_base = OTHER; note = "2'-deoxy-3'-fluoro nucleoside"
  modified_base 6: mod_base = OTHER; note = "2'-deoxy-3'-fluoro nucleoside"
  modified_base 8: mod_base = OTHER; note = "2'-deoxy-3'-fluoro nucleoside"
  modified_base 10: mod_base = OTHER; note = "2'-deoxy-3'-fluoro nucleoside"
  modified_base 12: mod_base = OTHER; note = "2'-deoxy-3'-fluoro nucleoside"
  modified_base 14: mod_base = OTHER; note = "2'-deoxy-3'-fluoro nucleoside"
  modified_base 16: mod_base = OTHER; note = "2'-deoxy-3'-fluoro nucleoside"
  modified_base 18: mod_base = OTHER; note = "2'-deoxy-3'-fluoro nucleoside"
  modified_base 3: mod_base = OTHER; note = "2'-O-Methyl nucleoside"
  modified_base 5: mod_base = OTHER; note = "2'-O-Methyl nucleoside"
  modified_base 9: mod_base = OTHER; note = "2'-O-Methyl nucleoside"
  modified_base 11: mod_base = OTHER; note = "2'-O-Methyl nucleoside"
  modified_base 13: mod_base = OTHER; note = "2'-O-Methyl nucleoside"
  modified_base 15: mod_base = OTHER; note = "2'-O-Methyl nucleoside"
  modified_base 17: mod_base = OTHER; note = "2'-O-Methyl nucleoside"
  modified_base 19: mod_base = OTHER; note = "2'-O-Methyl nucleoside"
  modified_base 21: mod_base = OTHER; note = "phosphorothioate linked nucleoside"
  modified_base 1: mod_base = OTHER; note = thymine
  modified_base 20: mod_base = OTHER; note = thymine
  modified_base 21: mod_base = OTHER; note = thymine
  source 1..21: mol_type = other RNA
taccaatttatgcctacagtt

SEQ ID NO: 216 - RNA, 21 nt, synthetic construct
  modified_base 1: mod_base = OTHER; note = thymine
  modified_base 20..21: mod_base = OTHER; note = thymine
  misc_feature 1..21: note = HBV RNAi trigger antisense strand
  modified_base 6: mod_base = OTHER; note = "2'-3' seco nucleoside"
  modified_base 2: mod_base = OTHER; note = "2'-deoxy-3'-fluoro nucleoside"
  modified_base 4: mod_base = OTHER; note = "2'-deoxy-3'-fluoro nucleoside"
  modified_base 8: mod_base = OTHER; note = "2'-deoxy-3'-fluoro nucleoside"
  modified_base 10: mod_base = OTHER; note = "2'-deoxy-3'-fluoro nucleoside"
  modified_base 12: mod_base = OTHER; note = "2'-deoxy-3'-fluoro nucleoside"
  modified_base 14: mod_base = OTHER; note = "2'-deoxy-3'-fluoro nucleoside"
  modified_base 16: mod_base = OTHER; note = "2'-deoxy-3'-fluoro nucleoside"
  modified_base 18: mod_base = OTHER; note = "2'-deoxy-3'-fluoro nucleoside"
  modified_base 3: mod_base = OTHER; note = "2'-O-Methyl nucleoside"
  modified_base 5: mod_base = OTHER; note = "2'-O-Methyl nucleoside"
  modified_base 7: mod_base = OTHER; note = "2'-O-Methyl nucleoside"
  modified_base 9: mod_base = OTHER; note = "2'-O-Methyl nucleoside"
  modified_base 11: mod_base = OTHER; note = "2'-O-Methyl nucleoside"
  modified_base 13: mod_base = OTHER; note = "2'-O-Methyl nucleoside"
  modified_base 15: mod_base = OTHER; note = "2'-O-Methyl nucleoside"
  modified_base 17: mod_base = OTHER; note = "2'-O-Methyl nucleoside"
  modified_base 19: mod_base = OTHER; note = "2'-O-Methyl nucleoside"
  modified_base 21: mod_base = OTHER; note = "phosphorothioate linked nucleoside"
  modified_base 1: mod_base = OTHER; note = thymine
  modified_base 20: mod_base = OTHER; note = thymine
  modified_base 21: mod_base = OTHER; note = thymine
  source 1..21: mol_type = other RNA
tagatgattaggcagaggttt

SEQ ID NO: 217 - RNA, 21 nt, synthetic construct
  modified_base 1: mod_base = OTHER; note = thymine
  modified_base 20..21: mod_base = OTHER; note = thymine
  misc_feature 1..21: note = HBV RNAi trigger antisense strand
  modified_base 7: mod_base = OTHER; note = "2'-3' seco nucleoside"
  modified_base 2: mod_base = OTHER; note = "2'-deoxy-3'-fluoro nucleoside"
  modified_base 4: mod_base = OTHER; note = "2'-deoxy-3'-fluoro nucleoside"
  modified_base 6: mod_base = OTHER; note = "2'-deoxy-3'-fluoro nucleoside"
  modified_base 8: mod_base = OTHER; note = "2'-deoxy-3'-fluoro nucleoside"
  modified_base 10: mod_base = OTHER; note = "2'-deoxy-3'-fluoro nucleoside"
  modified_base 12: mod_base = OTHER; note = "2'-deoxy-3'-fluoro nucleoside"
  modified_base 14: mod_base = OTHER; note = "2'-deoxy-3'-fluoro nucleoside"
  modified_base 16: mod_base = OTHER; note = "2'-deoxy-3'-fluoro nucleoside"
  modified_base 18: mod_base = OTHER; note = "2'-deoxy-3'-fluoro nucleoside"
  modified_base 3: mod_base = OTHER; note = "2'-O-Methyl nucleoside"
  modified_base 5: mod_base = OTHER; note = "2'-O-Methyl nucleoside"
  modified_base 9: mod_base = OTHER; note = "2'-O-Methyl nucleoside"
  modified_base 11: mod_base = OTHER; note = "2'-O-Methyl nucleoside"
  modified_base 13: mod_base = OTHER; note = "2'-O-Methyl nucleoside"
  modified_base 15: mod_base = OTHER; note = "2'-O-Methyl nucleoside"
  modified_base 17: mod_base = OTHER; note = "2'-O-Methyl nucleoside"
  modified_base 19: mod_base = OTHER; note = "2'-O-Methyl nucleoside"
  modified_base 21: mod_base = OTHER; note = "phosphorothioate linked nucleoside"
  modified_base 1: mod_base = OTHER; note = thymine
  modified_base 20: mod_base = OTHER; note = thymine
  modified_base 21: mod_base = OTHER; note = thymine
  source 1..21: mol_type = other RNA
tagatgattaggcagaggttt

SEQ ID NO: 218 - RNA, 21 nt, synthetic construct
  modified_base 1: mod_base = OTHER; note = thymine
  modified_base 20..21: mod_base = OTHER; note = thymine
  misc_feature 1..21: note = HBV RNAi trigger antisense strand
  modified_base 2: mod_base = OTHER; note = "2'-deoxy-3'-fluoro nucleoside"
  modified_base 4: mod_base = OTHER; note = "2'-deoxy-3'-fluoro nucleoside"
  modified_base 6: mod_base = OTHER; note = "2'-deoxy-3'-fluoro nucleoside"
  modified_base 8: mod_base = OTHER; note = "2'-deoxy-3'-fluoro nucleoside"
  modified_base 10: mod_base = OTHER; note = "2'-deoxy-3'-fluoro nucleoside"
  modified_base 12: mod_base = OTHER; note = "2'-deoxy-3'-fluoro nucleoside"
  modified_base 14: mod_base = OTHER; note = "2'-deoxy-3'-fluoro nucleoside"
  modified_base 16: mod_base = OTHER; note = "2'-deoxy-3'-fluoro nucleoside"
  modified_base 18: mod_base = OTHER; note = "2'-deoxy-3'-fluoro nucleoside"
  modified_base 3: mod_base = OTHER; note = "2'-O-Methyl nucleoside"
  modified_base 5: mod_base = OTHER; note = "2'-O-Methyl nucleoside"
  modified_base 7: mod_base = OTHER; note = "2'-O-Methyl nucleoside"
  modified_base 9: mod_base = OTHER; note = "2'-O-Methyl nucleoside"
  modified_base 11: mod_base = OTHER; note = "2'-O-Methyl nucleoside"
  modified_base 13: mod_base = OTHER; note = "2'-O-Methyl nucleoside"
  modified_base 15: mod_base = OTHER; note = "2'-O-Methyl nucleoside"
  modified_base 17: mod_base = OTHER; note = "2'-O-Methyl nucleoside"
  modified_base 19: mod_base = OTHER; note = "2'-O-Methyl nucleoside"
  modified_base 21: mod_base = OTHER; note = "phosphorothioate linked nucleoside"
  modified_base 1: mod_base = OTHER; note = "phosphate modified nucleoside"
  modified_base 1: mod_base = OTHER; note = thymine
  modified_base 20: mod_base = OTHER; note = thymine
  modified_base 21: mod_base = OTHER; note = thymine
  source 1..21: mol_type = other RNA
taccaatttatgcctacagtt

SEQ ID NO: 219 - RNA, 21 nt, synthetic construct
  modified_base 1: mod_base = OTHER; note = thymine
  modified_base 20..21: mod_base = OTHER; note = thymine
  misc_feature 1..21: note = HBV RNAi trigger antisense strand
  modified_base 2: mod_base = OTHER; note = "2'-deoxy-3'-fluoro nucleoside"
  modified_base 4: mod_base = OTHER; note = "2'-deoxy-3'-fluoro nucleoside"
  modified_base 6: mod_base = OTHER; note = "2'-deoxy-3'-fluoro nucleoside"
  modified_base 8: mod_base = OTHER; note = "2'-deoxy-3'-fluoro nucleoside"
  modified_base 10: mod_base = OTHER; note = "2'-deoxy-3'-fluoro nucleoside"
  modified_base 12: mod_base = OTHER; note = "2'-deoxy-3'-fluoro nucleoside"
  modified_base 14: mod_base = OTHER; note = "2'-deoxy-3'-fluoro nucleoside"
  modified_base 16: mod_base = OTHER; note = "2'-deoxy-3'-fluoro nucleoside"
  modified_base 18: mod_base = OTHER; note = "2'-deoxy-3'-fluoro nucleoside"
  modified_base 3: mod_base = OTHER; note = "2'-O-Methyl nucleoside"
  modified_base 5: mod_base = OTHER; note = "2'-O-Methyl nucleoside"
  modified_base 7: mod_base = OTHER; note = "2'-O-Methyl nucleoside"
  modified_base 9: mod_base = OTHER; note = "2'-O-Methyl nucleoside"
  modified_base 11: mod_base = OTHER; note = "2'-O-Methyl nucleoside"
  modified_base 13: mod_base = OTHER; note = "2'-O-Methyl nucleoside"
  modified_base 15: mod_base = OTHER; note = "2'-O-Methyl nucleoside"
  modified_base 17: mod_base = OTHER; note = "2'-O-Methyl nucleoside"
  modified_base 19: mod_base = OTHER; note = "2'-O-Methyl nucleoside"
  modified_base 21: mod_base = OTHER; note = "phosphorothioate linked nucleoside"
  modified_base 1: mod_base = OTHER; note = "phosphate modified nucleoside"
  modified_base 1: mod_base = OTHER; note = thymine
  modified_base 20: mod_base = OTHER; note = thymine
  modified_base 21: mod_base = OTHER; note = thymine
  source 1..21: mol_type = other RNA
tagatgattaggcagaggttt

SEQ ID NO: 220 - RNA, 21 nt, synthetic construct
  modified_base 1: mod_base = OTHER; note = thymine
  modified_base 20..21: mod_base = OTHER; note = thymine
  misc_feature 1..21: note = HBV RNAi trigger antisense strand
  modified_base 6: mod_base = OTHER; note = "2'-3' seco nucleoside"
  modified_base 2: mod_base = OTHER; note = "2'-deoxy-3'-fluoro nucleoside"
  modified_base 4: mod_base = OTHER; note = "2'-deoxy-3'-fluoro nucleoside"
  modified_base 8: mod_base = OTHER; note = "2'-deoxy-3'-fluoro nucleoside"
  modified_base 10: mod_base = OTHER; note = "2'-deoxy-3'-fluoro nucleoside"
  modified_base 14: mod_base = OTHER; note = "2'-deoxy-3'-fluoro nucleoside"
  modified_base 16: mod_base = OTHER; note = "2'-deoxy-3'-fluoro nucleoside"
  modified_base 18: mod_base = OTHER; note = "2'-deoxy-3'-fluoro nucleoside"
  modified_base 3: mod_base = OTHER; note = "2'-O-Methyl nucleoside"
  modified_base 5: mod_base = OTHER; note = "2'-O-Methyl nucleoside"
  modified_base 7: mod_base = OTHER; note = "2'-O-Methyl nucleoside"
  modified_base 9: mod_base = OTHER; note = "2'-O-Methyl nucleoside"
  modified_base 11..13: mod_base = OTHER; note = "2'-O-Methyl nucleoside"
  modified_base 15: mod_base = OTHER; note = "2'-O-Methyl nucleoside"
  modified_base 17: mod_base = OTHER; note = "2'-O-Methyl nucleoside"
  modified_base 19: mod_base = OTHER; note = "2'-O-Methyl nucleoside"
  modified_base 21: mod_base = OTHER; note = "phosphorothioate linked nucleoside"
  modified_base 1: mod_base = OTHER; note = thymine
  modified_base 20: mod_base = OTHER; note = thymine
  modified_base 21: mod_base = OTHER; note = thymine
  source 1..21: mol_type = other RNA
taccaatttatgcctacagtt

SEQ ID NO: 221 - RNA, 21 nt, synthetic construct
  modified_base 1: mod_base = OTHER; note = thymine
  modified_base 20..21: mod_base = OTHER; note = thymine
  misc_feature 1..21: note = HBV RNAi trigger antisense strand
  modified_base 6: mod_base = OTHER; note = "2'-3' seco nucleoside"
  modified_base 2: mod_base = OTHER; note = "2'-deoxy-3'-fluoro nucleoside"
  modified_base 4: mod_base = OTHER; note = "2'-deoxy-3'-fluoro nucleoside"
  modified_base 8: mod_base = OTHER; note = "2'-deoxy-3'-fluoro nucleoside"
  modified_base 10: mod_base = OTHER; note = "2'-deoxy-3'-fluoro nucleoside"
  modified_base 14: mod_base = OTHER; note = "2'-deoxy-3'-fluoro nucleoside"
  modified_base 16: mod_base = OTHER; note = "2'-deoxy-3'-fluoro nucleoside"
  modified_base 18: mod_base = OTHER; note = "2'-deoxy-3'-fluoro nucleoside"
  modified_base 3: mod_base = OTHER; note = "2'-O-Methyl nucleoside"
  modified_base 5: mod_base = OTHER; note = "2'-O-Methyl nucleoside"
  modified_base 7: mod_base = OTHER; note = "2'-O-Methyl nucleoside"
  modified_base 9: mod_base = OTHER; note = "2'-O-Methyl nucleoside"
  modified_base 11..13: mod_base = OTHER; note = "2'-O-Methyl nucleoside"
  modified_base 15: mod_base = OTHER; note = "2'-O-Methyl nucleoside"
  modified_base 17: mod_base = OTHER; note = "2'-O-Methyl nucleoside"
  modified_base 19: mod_base = OTHER; note = "2'-O-Methyl nucleoside"
  modified_base 2..3: mod_base = OTHER; note = "phosphorothioate linked nucleoside"
  modified_base 20..21: mod_base = OTHER; note = "phosphorothioate linked nucleoside"
  modified_base 1: mod_base = OTHER; note = thymine
  modified_base 20: mod_base = OTHER; note = thymine
  modified_base 21: mod_base = OTHER; note = thymine
  source 1..21: mol_type = other RNA
taccaatttatgcctacagtt

SEQ ID NO: 222 - RNA, 21 nt, synthetic construct
  modified_base 1: mod_base = OTHER; note = thymine
  modified_base 20..21: mod_base = OTHER; note = thymine
  misc_feature 1..21: note = HBV RNAi trigger antisense strand
  modified_base 7: mod_base = OTHER; note = "2'-3' seco nucleoside"
  modified_base 2: mod_base = OTHER; note = "2'-deoxy-3'-fluoro nucleoside"
  modified_base 4: mod_base = OTHER; note = "2'-deoxy-3'-fluoro nucleoside"
  modified_base 6: mod_base = OTHER; note = "2'-deoxy-3'-fluoro nucleoside"
  modified_base 8: mod_base = OTHER; note = "2'-deoxy-3'-fluoro nucleoside"
  modified_base 10: mod_base = OTHER; note = "2'-deoxy-3'-fluoro nucleoside"
  modified_base 14: mod_base = OTHER; note = "2'-deoxy-3'-fluoro nucleoside"
  modified_base 16: mod_base = OTHER; note = "2'-deoxy-3'-fluoro nucleoside"
  modified_base 18: mod_base = OTHER; note = "2'-deoxy-3'-fluoro nucleoside"
  modified_base 3: mod_base = OTHER; note = "2'-O-Methyl nucleoside"
  modified_base 5: mod_base = OTHER; note = "2'-O-Methyl nucleoside"
  modified_base 9: mod_base = OTHER; note = "2'-O-Methyl nucleoside"
  modified_base 11..12: mod_base = OTHER; note = "2'-O-Methyl nucleoside"
  modified_base 13: mod_base = OTHER; note = "2'-O-Methyl nucleoside"
  modified_base 15: mod_base = OTHER; note = "2'-O-Methyl nucleoside"
  modified_base 17: mod_base = OTHER; note = "2'-O-Methyl nucleoside"
  modified_base 19: mod_base = OTHER; note = "2'-O-Methyl nucleoside"
  modified_base 21: mod_base = OTHER; note = "phosphorothioate linked nucleoside"
  modified_base 1: mod_base = OTHER; note = thymine
  modified_base 20: mod_base = OTHER; note = thymine
  modified_base 21: mod_base = OTHER; note = thymine
  source 1..21: mol_type = other RNA
tagatgattaggcagaggttt

SEQ ID NO: 223 - RNA, 21 nt, synthetic construct
  modified_base 1: mod_base = OTHER; note = thymine
  modified_base 20..21: mod_base = OTHER; note = thymine
  misc_feature 1..21: note = HBV RNAi trigger antisense strand
  modified_base 7: mod_base = OTHER; note = "2'-3' seco nucleoside"
  modified_base 2: mod_base = OTHER; note = "2'-deoxy-3'-fluoro nucleoside"
  modified_base 4: mod_base = OTHER; note = "2'-deoxy-3'-fluoro nucleoside"
  modified_base 6: mod_base = OTHER; note = "2'-deoxy-3'-fluoro nucleoside"
  modified_base 8: mod_base = OTHER; note = "2'-deoxy-3'-fluoro nucleoside"
  modified_base 10: mod_base = OTHER; note = "2'-deoxy-3'-fluoro nucleoside"
  modified_base 14: mod_base = OTHER; note = "2'-deoxy-3'-fluoro nucleoside"
  modified_base 16: mod_base = OTHER; note = "2'-deoxy-3'-fluoro nucleoside"
  modified_base 18: mod_base = OTHER; note = "2'-deoxy-3'-fluoro nucleoside"
  modified_base 3: mod_base = OTHER; note = "2'-O-Methyl nucleoside"
  modified_base 5: mod_base = OTHER; note = "2'-O-Methyl nucleoside"
  modified_base 9: mod_base = OTHER; note = "2'-O-Methyl nucleoside"
  modified_base 11..12: mod_base = OTHER; note = "2'-O-Methyl nucleoside"
  modified_base 13: mod_base = OTHER; note = "2'-O-Methyl nucleoside"
  modified_base 15: mod_base = OTHER; note = "2'-O-Methyl nucleoside"
  modified_base 17: mod_base = OTHER; note = "2'-O-Methyl nucleoside"
  modified_base 19: mod_base = OTHER; note = "2'-O-Methyl nucleoside"
  modified_base 2..3: mod_base = OTHER; note = "phosphorothioate linked nucleoside"
  modified_base 20..21: mod_base = OTHER; note = "phosphorothioate linked nucleoside"
  modified_base 1: mod_base = OTHER; note = thymine
  modified_base 20: mod_base = OTHER; note = thymine
  modified_base 21: mod_base = OTHER; note = thymine
  source 1..21: mol_type = other RNA
tagatgattaggcagaggttt

SEQ ID NO: 224 - RNA, 21 nt, synthetic construct
  modified_base 1: mod_base = OTHER; note = thymine
  modified_base 20..21: mod_base = OTHER; note = thymine
  misc_feature 1..21: note = HBV RNAi trigger antisense strand
  modified_base 6: mod_base = OTHER; note = "2'-3' seco nucleoside"
  modified_base 2: mod_base = OTHER; note = "2'-deoxy-3'-fluoro nucleoside"
  modified_base 4: mod_base = OTHER; note = "2'-deoxy-3'-fluoro nucleoside"
  modified_base 8: mod_base = OTHER; note = "2'-deoxy-3'-fluoro nucleoside"
  modified_base 10: mod_base = OTHER; note = "2'-deoxy-3'-fluoro nucleoside"
  modified_base 12: mod_base = OTHER; note = "2'-deoxy-3'-fluoro nucleoside"
  modified_base 14: mod_base = OTHER; note = "2'-deoxy-3'-fluoro nucleoside"
  modified_base 16: mod_base = OTHER; note = "2'-deoxy-3'-fluoro nucleoside"
  modified_base 18: mod_base = OTHER; note = "2'-deoxy-3'-fluoro nucleoside"
  modified_base 3: mod_base = OTHER; note = "2'-O-Methyl nucleoside"
  modified_base 5: mod_base = OTHER; note = "2'-O-Methyl nucleoside"
  modified_base 7: mod_base = OTHER; note = "2'-O-Methyl nucleoside"
  modified_base 9: mod_base = OTHER; note = "2'-O-Methyl nucleoside"
  modified_base 11: mod_base = OTHER; note = "2'-O-Methyl nucleoside"
  modified_base 13: mod_base = OTHER; note = "2'-O-Methyl nucleoside"
  modified_base 15: mod_base = OTHER; note = "2'-O-Methyl nucleoside"
  modified_base 17: mod_base = OTHER; note = "2'-O-Methyl nucleoside"
  modified_base 19: mod_base = OTHER; note = "2'-O-Methyl nucleoside"
  modified_base 21: mod_base = OTHER; note = "phosphorothioate linked nucleoside"
  modified_base 1: mod_base = OTHER; note = thymine
  modified_base 20: mod_base = OTHER; note = thymine
  modified_base 21: mod_base = OTHER; note = thymine
  source 1..21: mol_type = other RNA
tacaaatggcactagtaaatt

SEQ ID NO: 225 - RNA, 21 nt, synthetic construct
  modified_base 1: mod_base = OTHER; note = thymine
  modified_base 20..21: mod_base = OTHER; note = thymine
  misc_feature 1..21: note = HBV RNAi trigger antisense strand
  modified_base 7: mod_base = OTHER; note = "2'-3' seco nucleoside"
  modified_base 2: mod_base = OTHER; note = "2'-deoxy-3'-fluoro nucleoside"
  modified_base 4: mod_base = OTHER; note = "2'-deoxy-3'-fluoro nucleoside"
  modified_base 6: mod_base = OTHER; note = "2'-deoxy-3'-fluoro nucleoside"
  modified_base 8: mod_base = OTHER; note = "2'-deoxy-3'-fluoro nucleoside"
  modified_base 10: mod_base = OTHER; note = "2'-deoxy-3'-fluoro nucleoside"
  modified_base 12: mod_base = OTHER; note = "2'-deoxy-3'-fluoro nucleoside"
  modified_base 14: mod_base = OTHER; note = "2'-deoxy-3'-fluoro nucleoside"
  modified_base 16: mod_base = OTHER; note = "2'-deoxy-3'-fluoro nucleoside"
  modified_base 18: mod_base = OTHER; note = "2'-deoxy-3'-fluoro nucleoside"
  modified_base 3: mod_base = OTHER; note = "2'-O-Methyl nucleoside"
  modified_base 5: mod_base = OTHER; note = "2'-O-Methyl nucleoside"
  modified_base 9: mod_base = OTHER; note = "2'-O-Methyl nucleoside"
  modified_base 11: mod_base = OTHER; note = "2'-O-Methyl nucleoside"
  modified_base 13: mod_base = OTHER; note = "2'-O-Methyl nucleoside"
  modified_base 15: mod_base = OTHER; note = "2'-O-Methyl nucleoside"
  modified_base 17: mod_base = OTHER; note = "2'-O-Methyl nucleoside"
  modified_base 19: mod_base = OTHER; note = "2'-O-Methyl nucleoside"
  modified_base 21: mod_base = OTHER; note = "phosphorothioate linked nucleoside"
  modified_base 1: mod_base = OTHER; note = thymine
  modified_base 20: mod_base = OTHER; note = thymine
  modified_base 21: mod_base = OTHER; note = thymine
  source 1..21: mol_type = other RNA
tacaaatggcactagtaaatt

SEQ ID NO: 226 - RNA, 21 nt, synthetic construct
  modified_base 1: mod_base = OTHER; note = thymine
  modified_base 20..21: mod_base = OTHER; note = thymine
  misc_feature 1..21: note = HBV RNAi trigger antisense strand
  modified_base 6: mod_base = OTHER; note = "2'-3' seco nucleoside"
  modified_base 2: mod_base = OTHER; note = "2'-deoxy-3'-fluoro nucleoside"
  modified_base 4: mod_base = OTHER; note = "2'-deoxy-3'-fluoro nucleoside"
  modified_base 8: mod_base = OTHER; note = "2'-deoxy-3'-fluoro nucleoside"
  modified_base 10: mod_base = OTHER; note = "2'-deoxy-3'-fluoro nucleoside"
  modified_base 14: mod_base = OTHER; note = "2'-deoxy-3'-fluoro nucleoside"
  modified_base 16: mod_base = OTHER; note = "2'-deoxy-3'-fluoro nucleoside"
  modified_base 18: mod_base = OTHER; note = "2'-deoxy-3'-fluoro nucleoside"
  modified_base 3: mod_base = OTHER; note = "2'-O-Methyl nucleoside"
  modified_base 5: mod_base = OTHER; note = "2'-O-Methyl nucleoside"
  modified_base 7: mod_base = OTHER; note = "2'-O-Methyl nucleoside"
  modified_base 9: mod_base = OTHER; note = "2'-O-Methyl nucleoside"
  modified_base 11..13: mod_base = OTHER; note = "2'-O-Methyl nucleoside"
  modified_base 15: mod_base = OTHER; note = "2'-O-Methyl nucleoside"
  modified_base 17: mod_base = OTHER; note = "2'-O-Methyl nucleoside"
  modified_base 19: mod_base = OTHER; note = "2'-O-Methyl nucleoside"
  modified_base 21: mod_base = OTHER; note = "phosphorothioate linked nucleoside"
  modified_base 1: mod_base = OTHER; note = thymine
  modified_base 20: mod_base = OTHER; note = thymine
  modified_base 21: mod_base = OTHER; note = thymine
  source 1..21: mol_type = other RNA
tacaaatggcactagtaaatt

SEQ ID NO: 227 - RNA, 21 nt, synthetic construct
  modified_base 1: mod_base = OTHER; note = thymine
  modified_base 20..21: mod_base = OTHER; note = thymine
  misc_feature 1..21: note = HBV RNAi trigger antisense strand
  modified_base 6: mod_base = OTHER; note = "2'-3' seco nucleoside"
  modified_base 2: mod_base = OTHER; note = "2'-deoxy-3'-fluoro nucleoside"
  modified_base 4: mod_base = OTHER; note = "2'-deoxy-3'-fluoro nucleoside"
  modified_base 8: mod_base = OTHER; note = "2'-deoxy-3'-fluoro nucleoside"
  modified_base 10: mod_base = OTHER; note = "2'-deoxy-3'-fluoro nucleoside"
  modified_base 14: mod_base = OTHER; note = "2'-deoxy-3'-fluoro nucleoside"
  modified_base 16: mod_base = OTHER; note = "2'-deoxy-3'-fluoro nucleoside"
  modified_base 18: mod_base = OTHER; note = "2'-deoxy-3'-fluoro nucleoside"
  modified_base 3: mod_base = OTHER; note = "2'-O-Methyl nucleoside"
  modified_base 5: mod_base = OTHER; note = "2'-O-Methyl nucleoside"
  modified_base 7: mod_base = OTHER; note = "2'-O-Methyl nucleoside"
  modified_base 9: mod_base = OTHER; note = "2'-O-Methyl nucleoside"
  modified_base 11..13: mod_base = OTHER; note = "2'-O-Methyl nucleoside"
  modified_base 15: mod_base = OTHER; note = "2'-O-Methyl nucleoside"
  modified_base 17: mod_base = OTHER; note = "2'-O-Methyl nucleoside"
  modified_base 19: mod_base = OTHER; note = "2'-O-Methyl nucleoside"
  modified_base 2..3: mod_base = OTHER; note = "phosphorothioate linked nucleoside"
  modified_base 20..21: mod_base = OTHER; note = "phosphorothioate linked nucleoside"
  modified_base 1: mod_base = OTHER; note = thymine
  modified_base 20: mod_base = OTHER; note = thymine
  modified_base 21: mod_base = OTHER; note = thymine
  source 1..21: mol_type = other RNA
tacaaatggcactagtaaatt

SEQ ID NO: 228 - RNA, 21 nt, synthetic construct
  modified_base 1: mod_base = OTHER; note = thymine
  modified_base 20..21: mod_base = OTHER; note = thymine
  misc_feature 1..21: note = HBV RNAi trigger antisense strand
  modified_base 7: mod_base = OTHER; note = "2'-3' seco nucleoside"
  modified_base 2: mod_base = OTHER; note = "2'-deoxy-3'-fluoro nucleoside"
  modified_base 4: mod_base = OTHER; note = "2'-deoxy-3'-fluoro nucleoside"
  modified_base 6: mod_base = OTHER; note = "2'-deoxy-3'-fluoro nucleoside"
  modified_base 8: mod_base = OTHER; note = "2'-deoxy-3'-fluoro nucleoside"
  modified_base 10: mod_base = OTHER; note = "2'-deoxy-3'-fluoro nucleoside"
  modified_base 14: mod_base = OTHER; note = "2'-deoxy-3'-fluoro nucleoside"
  modified_base 16: mod_base = OTHER; note = "2'-deoxy-3'-fluoro nucleoside"
  modified_base 18: mod_base = OTHER; note = "2'-deoxy-3'-fluoro nucleoside"
  modified_base 3: mod_base = OTHER; note = "2'-O-Methyl nucleoside"
  modified_base 5: mod_base = OTHER; note = "2'-O-Methyl nucleoside"
  modified_base 9: mod_base = OTHER; note = "2'-O-Methyl nucleoside"
  modified_base 11..12: mod_base = OTHER; note = "2'-O-Methyl nucleoside"
  modified_base 13: mod_base = OTHER; note = "2'-O-Methyl nucleoside"
  modified_base 15: mod_base = OTHER; note = "2'-O-Methyl nucleoside"
  modified_base 17: mod_base = OTHER; note = "2'-O-Methyl nucleoside"
  modified_base 19: mod_base = OTHER; note = "2'-O-Methyl nucleoside"
  modified_base 21: mod_base = OTHER; note = "phosphorothioate linked nucleoside"
  modified_base 1: mod_base = OTHER; note = thymine
  modified_base 20: mod_base = OTHER; note = thymine
  modified_base 21: mod_base = OTHER; note = thymine
  source 1..21: mol_type = other RNA
tacaaatggcactagtaaatt

SEQ ID NO: 229 - RNA, 21 nt, synthetic construct
  modified_base 1: mod_base = OTHER; note = thymine
  modified_base 20..21: mod_base = OTHER; note = thymine
  misc_feature 1..21: note = HBV RNAi trigger antisense strand
  modified_base 7: mod_base = OTHER; note = "2'-3' seco nucleoside"
  modified_base 2: mod_base = OTHER; note = "2'-deoxy-3'-fluoro nucleoside"
  modified_base 4: mod_base = OTHER; note = "2'-deoxy-3'-fluoro nucleoside"
  modified_base 6: mod_base = OTHER; note = "2'-deoxy-3'-fluoro nucleoside"
  modified_base 8: mod_base = OTHER; note = "2'-deoxy-3'-fluoro nucleoside"
  modified_base 10: mod_base = OTHER; note = "2'-deoxy-3'-fluoro nucleoside"
  modified_base 14: mod_base = OTHER; note = "2'-deoxy-3'-fluoro nucleoside"
  modified_base 16: mod_base = OTHER; note = "2'-deoxy-3'-fluoro nucleoside"
  modified_base 18: mod_base = OTHER; note = "2'-deoxy-3'-fluoro nucleoside"
  modified_base 3: mod_base = OTHER; note = "2'-O-Methyl nucleoside"
  modified_base 5: mod_base = OTHER; note = "2'-O-Methyl nucleoside"
  modified_base 9: mod_base = OTHER; note = "2'-O-Methyl nucleoside"
  modified_base 11..12: mod_base = OTHER; note = "2'-O-Methyl nucleoside"
  modified_base 13: mod_base = OTHER; note = "2'-O-Methyl nucleoside"
  modified_base 15: mod_base = OTHER; note = "2'-O-Methyl nucleoside"
  modified_base 17: mod_base = OTHER; note = "2'-O-Methyl nucleoside"
  modified_base 19: mod_base = OTHER; note = "2'-O-Methyl nucleoside"
  modified_base 2..3: mod_base = OTHER; note = "phosphorothioate linked nucleoside"
  modified_base 20..21: mod_base = OTHER; note = "phosphorothioate linked nucleoside"
  modified_base 1: mod_base = OTHER; note = thymine
  modified_base 20: mod_base = OTHER; note = thymine
  modified_base 21: mod_base = OTHER; note = thymine
  source 1..21: mol_type = other RNA
tacaaatggcactagtaaatt

SEQ ID NO: 230 - RNA, 21 nt, synthetic construct
  modified_base 1: mod_base = OTHER; note = thymine
  modified_base 20..21: mod_base = OTHER; note = thymine
  misc_feature 1..21: note = HBV RNAi trigger antisense strand
  modified_base 6: mod_base = OTHER; note = "2'-3' seco nucleoside"
  modified_base 2: mod_base = OTHER; note = "2'-deoxy-3'-fluoro nucleoside"
  modified_base 4: mod_base = OTHER; note = "2'-deoxy-3'-fluoro nucleoside"
  modified_base 8: mod_base = OTHER; note = "2'-deoxy-3'-fluoro nucleoside"
  modified_base 10: mod_base = OTHER; note = "2'-deoxy-3'-fluoro nucleoside"
  modified_base 12: mod_base = OTHER; note = "2'-deoxy-3'-fluoro nucleoside"
  modified_base 14: mod_base = OTHER; note = "2'-deoxy-3'-fluoro nucleoside"
  modified_base 16: mod_base = OTHER; note = "2'-deoxy-3'-fluoro nucleoside"
  modified_base 18: mod_base = OTHER; note = "2'-deoxy-3'-fluoro nucleoside"
  modified_base 3: mod_base = OTHER; note = "2'-O-Methyl nucleoside"
  modified_base 5: mod_base = OTHER; note = "2'-O-Methyl nucleoside"
  modified_base 7: mod_base = OTHER; note = "2'-O-Methyl nucleoside"
  modified_base 9: mod_base = OTHER; note = "2'-O-Methyl nucleoside"
  modified_base 11: mod_base = OTHER; note = "2'-O-Methyl nucleoside"
  modified_base 13: mod_base = OTHER; note = "2'-O-Methyl nucleoside"
  modified_base 15: mod_base = OTHER; note = "2'-O-Methyl nucleoside"
  modified_base 17: mod_base = OTHER; note = "2'-O-Methyl nucleoside"
  modified_base 19: mod_base = OTHER; note = "2'-O-Methyl nucleoside"
  modified_base 21: mod_base = OTHER; note = "phosphorothioate linked nucleoside"
  modified_base 1: mod_base = OTHER; note = thymine
  modified_base 20: mod_base = OTHER; note = thymine
  modified_base 21: mod_base = OTHER; note = thymine
  source 1..21: mol_type = other RNA
tatgataaaacgccgcagatt

SEQ ID NO: 231 - RNA, 21 nt, synthetic construct
  modified_base 1: mod_base = OTHER; note = thymine
  modified_base 20..21: mod_base = OTHER; note = thymine
  misc_feature 1..21: note = HBV RNAi trigger antisense strand
  modified_base 7: mod_base = OTHER; note = "2'-3' seco nucleoside"
  modified_base 2: mod_base = OTHER; note = "2'-deoxy-3'-fluoro nucleoside"
  modified_base 4: mod_base = OTHER; note = "2'-deoxy-3'-fluoro nucleoside"
  modified_base 6: mod_base = OTHER; note = "2'-deoxy-3'-fluoro nucleoside"
  modified_base 8: mod_base = OTHER; note = "2'-deoxy-3'-fluoro nucleoside"
  modified_base 10: mod_base = OTHER; note = "2'-deoxy-3'-fluoro nucleoside"
  modified_base 12: mod_base = OTHER; note = "2'-deoxy-3'-fluoro nucleoside"
  modified_base 14: mod_base = OTHER; note = "2'-deoxy-3'-fluoro nucleoside"
  modified_base 16: mod_base = OTHER; note = "2'-deoxy-3'-fluoro nucleoside"
  modified_base 18: mod_base = OTHER; note = "2'-deoxy-3'-fluoro nucleoside"
  modified_base 3: mod_base = OTHER; note = "2'-O-Methyl nucleoside"
  modified_base 5: mod_base = OTHER; note = "2'-O-Methyl nucleoside"
  modified_base 9: mod_base = OTHER; note = "2'-O-Methyl nucleoside"
  modified_base 11: mod_base = OTHER; note = "2'-O-Methyl nucleoside"
  modified_base 13: mod_base = OTHER; note = "2'-O-Methyl nucleoside"
  modified_base 15: mod_base = OTHER; note = "2'-O-Methyl nucleoside"
  modified_base 17: mod_base = OTHER; note = "2'-O-Methyl nucleoside"
  modified_base 19: mod_base = OTHER; note = "2'-O-Methyl nucleoside"
  modified_base 21: mod_base = OTHER; note = "phosphorothioate linked nucleoside"
  modified_base 1: mod_base = OTHER; note = thymine
  modified_base 20: mod_base = OTHER; note = thymine
  modified_base 21: mod_base = OTHER; note = thymine
  source 1..21: mol_type = other RNA
tatgataaaacgccgcagatt

SEQ ID NO: 232 - RNA, 21 nt, synthetic construct
  modified_base 1: mod_base = OTHER; note = thymine
  modified_base 20..21: mod_base = OTHER; note = thymine
  misc_feature 1..21: note = HBV RNAi trigger antisense strand
  modified_base 6: mod_base = OTHER; note = "2'-3' seco nucleoside"
  modified_base 2: mod_base = OTHER; note = "2'-deoxy-3'-fluoro nucleoside"
  modified_base 4: mod_base = OTHER; note = "2'-deoxy-3'-fluoro nucleoside"
  modified_base 8: mod_base = OTHER; note = "2'-deoxy-3'-fluoro nucleoside"
  modified_base 10: mod_base = OTHER; note = "2'-deoxy-3'-fluoro nucleoside"
  modified_base 14: mod_base = OTHER; note = "2'-deoxy-3'-fluoro nucleoside"
  modified_base 16: mod_base = OTHER; note = "2'-deoxy-3'-fluoro nucleoside"
  modified_base 18: mod_base = OTHER; note = "2'-deoxy-3'-fluoro nucleoside"
  modified_base 3: mod_base = OTHER; note = "2'-O-Methyl nucleoside"
  modified_base 5: mod_base = OTHER; note = "2'-O-Methyl nucleoside"
  modified_base 7: mod_base = OTHER; note = "2'-O-Methyl nucleoside"
  modified_base 9: mod_base = OTHER; note = "2'-O-Methyl nucleoside"
  modified_base 11..13: mod_base = OTHER; note = "2'-O-Methyl nucleoside"
  modified_base 15: mod_base = OTHER; note = "2'-O-Methyl nucleoside"
  modified_base 17: mod_base = OTHER; note = "2'-O-Methyl nucleoside"
  modified_base 19: mod_base = OTHER; note = "2'-O-Methyl nucleoside"
  modified_base 21: mod_base = OTHER; note = "phosphorothioate linked nucleoside"
  modified_base 1: mod_base = OTHER; note = thymine
  modified_base 20: mod_base = OTHER; note = thymine
  modified_base 21: mod_base = OTHER; note = thymine
  source 1..21: mol_type = other RNA
tatgataaaacgccgcagatt

SEQ ID NO: 233 - RNA, 21 nt, synthetic construct
  modified_base 1: mod_base = OTHER; note = thymine
  modified_base 20..21: mod_base = OTHER; note = thymine
  misc_feature 1..21: note = HBV RNAi trigger antisense strand
  modified_base 6: mod_base = OTHER; note = "2'-3' seco nucleoside"
  modified_base 2: mod_base = OTHER; note = "2'-deoxy-3'-fluoro nucleoside"
  modified_base 4: mod_base = OTHER; note = "2'-deoxy-3'-fluoro nucleoside"
  modified_base 8: mod_base = OTHER; note = "2'-deoxy-3'-fluoro nucleoside"
  modified_base 10: mod_base = OTHER; note = "2'-deoxy-3'-fluoro nucleoside"
  modified_base 14: mod_base = OTHER; note = "2'-deoxy-3'-fluoro nucleoside"
  modified_base 16: mod_base = OTHER; note = "2'-deoxy-3'-fluoro nucleoside"
  modified_base 18: mod_base = OTHER; note = "2'-deoxy-3'-fluoro nucleoside"
  modified_base 3: mod_base = OTHER; note = "2'-O-Methyl nucleoside"
  modified_base 5: mod_base = OTHER; note = "2'-O-Methyl nucleoside"
  modified_base 7: mod_base = OTHER; note = "2'-O-Methyl nucleoside"
  modified_base 9: mod_base = OTHER; note = "2'-O-Methyl nucleoside"
  modified_base 11..13: mod_base = OTHER; note = "2'-O-Methyl nucleoside"
  modified_base 15: mod_base = OTHER; note = "2'-O-Methyl nucleoside"
  modified_base 17: mod_base = OTHER; note = "2'-O-Methyl nucleoside"
  modified_base 19: mod_base = OTHER; note = "2'-O-Methyl nucleoside"
  modified_base 2..3: mod_base = OTHER; note = "phosphorothioate linked nucleoside"
  modified_base 20..21: mod_base = OTHER; note = "phosphorothioate linked nucleoside"
  modified_base 1: mod_base = OTHER; note = thymine
  modified_base 20: mod_base = OTHER; note = thymine
  modified_base 21: mod_base = OTHER; note = thymine
  source 1..21: mol_type = other RNA
tatgataaaacgccgcagatt

SEQ ID NO: 234 - RNA, 21 nt, synthetic construct
  modified_base 1: mod_base = OTHER; note = thymine
  modified_base 20..21: mod_base = OTHER; note = thymine
  misc_feature 1..21: note = HBV RNAi trigger antisense strand
  modified_base 7: mod_base = OTHER; note = "2'-3' seco nucleoside"
  modified_base 2: mod_base = OTHER; note = "2'-deoxy-3'-fluoro nucleoside"
  modified_base 4: mod_base = OTHER; note = "2'-deoxy-3'-fluoro nucleoside"
  modified_base 6: mod_base = OTHER; note = "2'-deoxy-3'-fluoro nucleoside"
  modified_base 8: mod_base = OTHER; note = "2'-deoxy-3'-fluoro nucleoside"
  modified_base 10: mod_base = OTHER; note = "2'-deoxy-3'-fluoro nucleoside"
  modified_base 14: mod_base = OTHER; note = "2'-deoxy-3'-fluoro nucleoside"
  modified_base 16: mod_base = OTHER; note = "2'-deoxy-3'-fluoro nucleoside"
  modified_base 18: mod_base = OTHER; note = "2'-deoxy-3'-fluoro nucleoside"
  modified_base 3: mod_base = OTHER; note = "2'-O-Methyl nucleoside"
  modified_base 5: mod_base = OTHER; note = "2'-O-Methyl nucleoside"
  modified_base 9: mod_base = OTHER; note = "2'-O-Methyl nucleoside"
  modified_base 11..12: mod_base = OTHER; note = "2'-O-Methyl nucleoside"
  modified_base 13: mod_base = OTHER; note = "2'-O-Methyl nucleoside"
  modified_base 15: mod_base = OTHER; note = "2'-O-Methyl nucleoside"
  modified_base 17: mod_base = OTHER; note = "2'-O-Methyl nucleoside"
  modified_base 19: mod_base = OTHER; note = "2'-O-Methyl nucleoside"
  modified_base 21: mod_base = OTHER; note = "phosphorothioate linked nucleoside"
  modified_base 1: mod_base = OTHER; note = thymine
  modified_base 20: mod_base = OTHER; note = thymine
  modified_base 21: mod_base = OTHER; note = thymine
  source 1..21: mol_type = other RNA
tatgataaaacgccgcagatt

SEQ ID NO: 235 - RNA, 21 nt, synthetic construct
  modified_base 1: mod_base = OTHER; note = thymine
  modified_base 20..21: mod_base = OTHER; note = thymine
  misc_feature 1..21: note = HBV RNAi trigger antisense strand
  modified_base 7: mod_base = OTHER; note = "2'-3' seco nucleoside"
  modified_base 2: mod_base = OTHER; note = "2'-deoxy-3'-fluoro nucleoside"
  modified_base 4: mod_base = OTHER; note = "2'-deoxy-3'-fluoro nucleoside"
  modified_base 6: mod_base = OTHER; note = "2'-deoxy-3'-fluoro nucleoside"
  modified_base 8: mod_base = OTHER; note = "2'-deoxy-3'-fluoro nucleoside"
  modified_base 10: mod_base = OTHER; note = "2'-deoxy-3'-fluoro nucleoside"
  modified_base 14: mod_base = OTHER; note = "2'-deoxy-3'-fluoro nucleoside"
  modified_base 16: mod_base = OTHER; note = "2'-deoxy-3'-fluoro nucleoside"
  modified_base 18: mod_base = OTHER; note = "2'-deoxy-3'-fluoro nucleoside"
  modified_base 3: mod_base = OTHER; note = "2'-O-Methyl nucleoside"
  modified_base 5: mod_base = OTHER; note = "2'-O-Methyl nucleoside"
  modified_base 9: mod_base = OTHER; note = "2'-O-Methyl nucleoside"
  modified_base 11..12: mod_base = OTHER; note = "2'-O-Methyl nucleoside"
  modified_base 13: mod_base = OTHER; note = "2'-O-Methyl nucleoside"
  modified_base 15: mod_base = OTHER; note = "2'-O-Methyl nucleoside"
  modified_base 17: mod_base = OTHER; note = "2'-O-Methyl nucleoside"
  modified_base 19: mod_base = OTHER; note = "2'-O-Methyl nucleoside"
  modified_base 2..3: mod_base = OTHER; note = "phosphorothioate linked nucleoside"
  modified_base 20..21: mod_base = OTHER; note = "phosphorothioate linked nucleoside"
  modified_base 1: mod_base = OTHER; note = thymine
  modified_base 20: mod_base = OTHER; note = thymine
  modified_base 21: mod_base = OTHER; note = thymine
  source 1..21: mol_type = other RNA
tatgataaaacgccgcagatt

SEQ ID NO: 236 - RNA, 21 nt, synthetic construct
  modified_base 1: mod_base = OTHER; note = thymine
  modified_base 20..21: mod_base = OTHER; note = thymine
  misc_feature 1..21: note = HBV RNAi trigger antisense strand
  modified_base 2: mod_base = OTHER; note = "2'-deoxy-3'-fluoro nucleoside"
  modified_base 4: mod_base = OTHER; note = "2'-deoxy-3'-fluoro nucleoside"
  modified_base 6: mod_base = OTHER; note = "2'-deoxy-3'-fluoro nucleoside"
  modified_base 8: mod_base = OTHER; note = "2'-deoxy-3'-fluoro nucleoside"
  modified_base 10: mod_base = OTHER; note = "2'-deoxy-3'-fluoro nucleoside"
  modified_base 12: mod_base = OTHER; note = "2'-deoxy-3'-fluoro nucleoside"
  modified_base 14: mod_base = OTHER; note = "2'-deoxy-3'-fluoro nucleoside"
  modified_base 16: mod_base = OTHER; note = "2'-deoxy-3'-fluoro nucleoside"
  modified_base 18: mod_base = OTHER; note = "2'-deoxy-3'-fluoro nucleoside"
  modified_base 3: mod_base = OTHER; note = "2'-O-Methyl nucleoside"
  modified_base 5: mod_base = OTHER; note = "2'-O-Methyl nucleoside"
  modified_base 7: mod_base = OTHER; note = "2'-O-Methyl nucleoside"
  modified_base 9: mod_base = OTHER; note = "2'-O-Methyl nucleoside"
  modified_base 11: mod_base = OTHER; note = "2'-O-Methyl nucleoside"
  modified_base 13: mod_base = OTHER; note = "2'-O-Methyl nucleoside"
  modified_base 15: mod_base = OTHER; note = "2'-O-Methyl nucleoside"
  modified_base 17: mod_base = OTHER; note = "2'-O-Methyl nucleoside"
  modified_base 19: mod_base = OTHER; note = "2'-O-Methyl nucleoside"
  modified_base 2..3: mod_base = OTHER; note = "phosphorothioate linked nucleoside"
  modified_base 20..21: mod_base = OTHER; note = "phosphorothioate linked nucleoside"
  modified_base 1: mod_base = OTHER; note = thymine
  modified_base 20: mod_base = OTHER; note = thymine
  modified_base 21: mod_base = OTHER; note = thymine
  source 1..21: mol_type = other RNA
taccaatttatgcctacagtt

SEQ ID NO: 237 - RNA, 21 nt, synthetic construct
  modified_base 1: mod_base = OTHER; note = thymine
  modified_base 20..21: mod_base = OTHER; note = thymine
  misc_feature 1..21: note = HBV RNAi trigger antisense strand
  modified_base 2: mod_base = OTHER; note = "2'-deoxy-3'-fluoro nucleoside"
  modified_base 4: mod_base = OTHER; note = "2'-deoxy-3'-fluoro nucleoside"
  modified_base 6: mod_base = OTHER; note = "2'-deoxy-3'-fluoro nucleoside"
  modified_base 8: mod_base = OTHER; note = "2'-deoxy-3'-fluoro nucleoside"
  modified_base 10: mod_base = OTHER; note = "2'-deoxy-3'-fluoro nucleoside"
  modified_base 14: mod_base = OTHER; note = "2'-deoxy-3'-fluoro nucleoside"
  modified_base 16: mod_base = OTHER; note = "2'-deoxy-3'-fluoro nucleoside"
  modified_base 18: mod_base = OTHER; note = "2'-deoxy-3'-fluoro nucleoside"
  modified_base 3: mod_base = OTHER; note = "2'-O-Methyl nucleoside"
  modified_base 5: mod_base = OTHER; note = "2'-O-Methyl nucleoside"
  modified_base 7: mod_base = OTHER; note = "2'-O-Methyl nucleoside"
  modified_base 9: mod_base = OTHER; note = "2'-O-Methyl nucleoside"
  modified_base 11..13: mod_base = OTHER; note = "2'-O-Methyl nucleoside"
  modified_base 15: mod_base = OTHER; note = "2'-O-Methyl nucleoside"
  modified_base 17: mod_base = OTHER; note = "2'-O-Methyl nucleoside"
  modified_base 19: mod_base = OTHER; note = "2'-O-Methyl nucleoside"
  modified_base 2..3: mod_base = OTHER; note = "phosphorothioate linked nucleoside"
  modified_base 20..21: mod_base = OTHER; note = "phosphorothioate linked nucleoside"
  modified_base 1: mod_base = OTHER; note = thymine
  modified_base 20: mod_base = OTHER; note = thymine
  modified_base 21: mod_base = OTHER; note = thymine
  source 1..21: mol_type = other RNA
taccaatttatgcctacagtt

SEQ ID NO: 238 - RNA, 21 nt, synthetic construct
  modified_base 1: mod_base = OTHER; note = thymine
  modified_base 20..21: mod_base = OTHER; note = thymine
  misc_feature 1..21: note = HBV RNAi trigger antisense strand
  modified_base 2: mod_base = OTHER; note = "2'-deoxy-3'-fluoro nucleoside"
  modified_base 4: mod_base = OTHER; note = "2'-deoxy-3'-fluoro nucleoside"
  modified_base 6: mod_base = OTHER; note = "2'-deoxy-3'-fluoro nucleoside"
  modified_base 8: mod_base = OTHER; note = "2'-deoxy-3'-fluoro nucleoside"
  modified_base 10: mod_base = OTHER; note = "2'-deoxy-3'-fluoro nucleoside"
  modified_base 12: mod_base = OTHER; note = "2'-deoxy-3'-fluoro nucleoside"
  modified_base 14: mod_base = OTHER; note = "2'-deoxy-3'-fluoro nucleoside"
  modified_base 16: mod_base = OTHER; note = "2'-deoxy-3'-fluoro nucleoside"
  modified_base 18: mod_base = OTHER; note = "2'-deoxy-3'-fluoro nucleoside"
  modified_base 3: mod_base = OTHER; note = "2'-O-Methyl nucleoside"
  modified_base 5: mod_base = OTHER; note = "2'-O-Methyl nucleoside"
  modified_base 7: mod_base = OTHER; note = "2'-O-Methyl nucleoside"
  modified_base 9: mod_base = OTHER; note = "2'-O-Methyl nucleoside"
  modified_base 11: mod_base = OTHER; note = "2'-O-Methyl nucleoside"
  modified_base 13: mod_base = OTHER; note = "2'-O-Methyl nucleoside"
  modified_base 15: mod_base = OTHER; note = "2'-O-Methyl nucleoside"
  modified_base 17: mod_base = OTHER; note = "2'-O-Methyl nucleoside"
  modified_base 19: mod_base = OTHER; note = "2'-O-Methyl nucleoside"
  modified_base 2..3: mod_base = OTHER; note = "phosphorothioate linked nucleoside"
  modified_base 20..21: mod_base = OTHER; note = "phosphorothioate linked nucleoside"
  modified_base 1: mod_base = OTHER; note = thymine
  modified_base 20: mod_base = OTHER; note = thymine
  modified_base 21: mod_base = OTHER; note = thymine
  source 1..21: mol_type = other RNA
tagatgattaggcagaggttt

SEQ ID NO: 239 - RNA, 21 nt, synthetic construct
  modified_base 1: mod_base = OTHER; note = thymine
  modified_base 20..21: mod_base = OTHER; note = thymine
  misc_feature 1..21: note = HBV RNAi trigger antisense strand
  modified_base 2: mod_base = OTHER; note = "2'-deoxy-3'-fluoro nucleoside"
  modified_base 4: mod_base = OTHER; note = "2'-deoxy-3'-fluoro nucleoside"
  modified_base 6: mod_base = OTHER; note = "2'-deoxy-3'-fluoro nucleoside"
  modified_base 8: mod_base = OTHER; note = "2'-deoxy-3'-fluoro nucleoside"
  modified_base 10: mod_base = OTHER; note = "2'-deoxy-3'-fluoro nucleoside"
  modified_base 14: mod_base = OTHER; note = "2'-deoxy-3'-fluoro nucleoside"
  modified_base 16: mod_base = OTHER; note = "2'-deoxy-3'-fluoro nucleoside"
  modified_base 18: mod_base = OTHER; note = "2'-deoxy-3'-fluoro nucleoside"
  modified_base 3: mod_base = OTHER; note = "2'-O-Methyl nucleoside"
  modified_base 5: mod_base = OTHER; note = "2'-O-Methyl nucleoside"
  modified_base 7: mod_base = OTHER; note = "2'-O-Methyl nucleoside"
  modified_base 9: mod_base = OTHER; note = "2'-O-Methyl nucleoside"
  modified_base 11..13: mod_base = OTHER; note = "2'-O-Methyl nucleoside"
  modified_base 15: mod_base = OTHER; note = "2'-O-Methyl nucleoside"
  modified_base 17: mod_base = OTHER; note = "2'-O-Methyl nucleoside"
  modified_base 19: mod_base = OTHER; note = "2'-O-Methyl nucleoside"
  modified_base 2..3: mod_base = OTHER; note = "phosphorothioate linked nucleoside"
  modified_base 20..21: mod_base = OTHER; note = "phosphorothioate linked nucleoside"
  modified_base 1: mod_base = OTHER; note = thymine
  modified_base 20: mod_base = OTHER; note = thymine
  modified_base 21: mod_base = OTHER; note = thymine
  source 1..21: mol_type = other RNA
tagatgattaggcagaggttt

SEQ ID NO: 240 - RNA, 21 nt, synthetic construct
  modified_base 1: mod_base = OTHER; note = thymine
  modified_base 20..21: mod_base = OTHER; note = thymine
  misc_feature 1..21: note = HBV RNAi trigger antisense strand
  modified_base 2: mod_base = OTHER; note = "2'-deoxy-3'-fluoro nucleoside"
  modified_base 4: mod_base = OTHER; note = "2'-deoxy-3'-fluoro nucleoside"
  modified_base 6: mod_base = OTHER; note = "2'-deoxy-3'-fluoro nucleoside"
  modified_base 8: mod_base = OTHER; note = "2'-deoxy-3'-fluoro nucleoside"
  modified_base 10: mod_base = OTHER; note = "2'-deoxy-3'-fluoro nucleoside"
  modified_base 12: mod_base = OTHER; note = "2'-deoxy-3'-fluoro nucleoside"
  modified_base 14: mod_base = OTHER; note = "2'-deoxy-3'-fluoro nucleoside"
  modified_base 16: mod_base = OTHER; note = "2'-deoxy-3'-fluoro nucleoside"
  modified_base 18: mod_base = OTHER; note = "2'-deoxy-3'-fluoro nucleoside"
  modified_base 3: mod_base = OTHER; note = "2'-O-Methyl nucleoside"
  modified_base 5: mod_base = OTHER; note = "2'-O-Methyl nucleoside"
  modified_base 7: mod_base = OTHER; note = "2'-O-Methyl nucleoside"
  modified_base 9: mod_base = OTHER; note = "2'-O-Methyl nucleoside"
  modified_base 11: mod_base = OTHER; note = "2'-O-Methyl nucleoside"
  modified_base 13: mod_base = OTHER; note = "2'-O-Methyl nucleoside"
  modified_base 15: mod_base = OTHER; note = "2'-O-Methyl nucleoside"
  modified_base 17: mod_base = OTHER; note = "2'-O-Methyl nucleoside"
  modified_base 19: mod_base = OTHER; note = "2'-O-Methyl nucleoside"
  modified_base 2..3: mod_base = OTHER; note = "phosphorothioate linked nucleoside"
  modified_base 20..21: mod_base = OTHER; note = "phosphorothioate linked nucleoside"
  modified_base 1: mod_base = OTHER; note = thymine
  modified_base 20: mod_base = OTHER; note = thymine
  modified_base 21: mod_base = OTHER; note = thymine
  source 1..21: mol_type = other RNA
tacaaatggcactagtaaatt

SEQ ID NO: 241 - RNA, 21 nt, synthetic construct
  modified_base 1: mod_base = OTHER; note = thymine
  modified_base 20..21: mod_base = OTHER; note = thymine
  misc_feature 1..21: note = HBV RNAi trigger antisense strand
  modified_base 2: mod_base = OTHER; note = "2'-deoxy-3'-fluoro nucleoside"
  modified_base 4: mod_base = OTHER; note = "2'-deoxy-3'-fluoro nucleoside"
  modified_base 6: mod_base = OTHER; note = "2'-deoxy-3'-fluoro nucleoside"
  modified_base 8: mod_base = OTHER; note = "2'-deoxy-3'-fluoro nucleoside"
  modified_base 10: mod_base = OTHER; note = "2'-deoxy-3'-fluoro nucleoside"
  modified_base 14: mod_base = OTHER; note = "2'-deoxy-3'-fluoro nucleoside"
  modified_base 16: mod_base = OTHER; note = "2'-deoxy-3'-fluoro nucleoside"
  modified_base 18: mod_base = OTHER; note = "2'-deoxy-3'-fluoro nucleoside"
  modified_base 3: mod_base = OTHER; note = "2'-O-Methyl nucleoside"
  modified_base 5: mod_base = OTHER; note = "2'-O-Methyl nucleoside"
  modified_base 7: mod_base = OTHER; note = "2'-O-Methyl nucleoside"
  modified_base 9: mod_base = OTHER; note = "2'-O-Methyl nucleoside"
  modified_base 11..13: mod_base = OTHER; note = "2'-O-Methyl nucleoside"
  modified_base 15: mod_base = OTHER; note = "2'-O-Methyl nucleoside"
  modified_base 17: mod_base = OTHER; note = "2'-O-Methyl nucleoside"
  modified_base 19: mod_base = OTHER; note = "2'-O-Methyl nucleoside"
  modified_base 2..3: mod_base = OTHER; note = "phosphorothioate linked nucleoside"
  modified_base 20..21: mod_base = OTHER; note = "phosphorothioate linked nucleoside"
  modified_base 1: mod_base = OTHER; note = thymine
  modified_base 20: mod_base = OTHER; note = thymine
  modified_base 21: mod_base = OTHER; note = thymine
  source 1..21: mol_type = other RNA
tacaaatggcactagtaaatt

SEQ ID NO: 242 - RNA, 21 nt, synthetic construct
  modified_base 1: mod_base = OTHER; note = thymine
  modified_base 20..21: mod_base = OTHER; note = thymine
  misc_feature 1..21: note = HBV RNAi trigger antisense strand
  modified_base 2: mod_base = OTHER; note = "2'-deoxy-3'-fluoro nucleoside"
  modified_base 4: mod_base = OTHER; note = "2'-deoxy-3'-fluoro nucleoside"
  modified_base 6: mod_base = OTHER; note = "2'-deoxy-3'-fluoro nucleoside"
  modified_base 8: mod_base = OTHER; note = "2'-deoxy-3'-fluoro nucleoside"
  modified_base 10: mod_base = OTHER; note = "2'-deoxy-3'-fluoro nucleoside"
  modified_base 12: mod_base = OTHER; note = "2'-deoxy-3'-fluoro nucleoside"
  modified_base 14: mod_base = OTHER; note = "2'-deoxy-3'-fluoro nucleoside"
  modified_base 16: mod_base = OTHER; note = "2'-deoxy-3'-fluoro nucleoside"
  modified_base 18: mod_base = OTHER; note = "2'-deoxy-3'-fluoro nucleoside"
  modified_base 3: mod_base = OTHER; note = "2'-O-Methyl nucleoside"
  modified_base 5: mod_base = OTHER; note = "2'-O-Methyl nucleoside"
  modified_base 7: mod_base = OTHER; note = "2'-O-Methyl nucleoside"
  modified_base 9: mod_base = OTHER; note = "2'-O-Methyl nucleoside"
  modified_base 11: mod_base = OTHER; note = "2'-O-Methyl nucleoside"
  modified_base 13: mod_base = OTHER; note = "2'-O-Methyl nucleoside"
  modified_base 15: mod_base = OTHER; note = "2'-O-Methyl nucleoside"
  modified_base 17: mod_base = OTHER; note = "2'-O-Methyl nucleoside"
  modified_base 19: mod_base = OTHER; note = "2'-O-Methyl nucleoside"
  modified_base 2..3: mod_base = OTHER; note = "phosphorothioate linked nucleoside"
  modified_base 20..21: mod_base = OTHER; note = "phosphorothioate linked nucleoside"
  modified_base 1: mod_base = OTHER; note = thymine
  modified_base 20: mod_base = OTHER; note = thymine
  modified_base 21: mod_base = OTHER; note = thymine
  source 1..21: mol_type = other RNA
tatgataaaacgccgcagatt

SEQ ID NO: 243 - RNA, 21 nt, synthetic construct
  modified_base 1: mod_base = OTHER; note = thymine
  modified_base 20..21: mod_base = OTHER; note = thymine
  misc_feature 1..21: note = HBV RNAi trigger antisense strand
  modified_base 2: mod_base = OTHER; note = "2'-deoxy-3'-fluoro nucleoside"
  modified_base 4: mod_base = OTHER; note = "2'-deoxy-3'-fluoro nucleoside"
  modified_base 6: mod_base = OTHER; note = "2'-deoxy-3'-fluoro nucleoside"
  modified_base 8: mod_base = OTHER; note = "2'-deoxy-3'-fluoro nucleoside"
  modified_base 10: mod_base = OTHER; note = "2'-deoxy-3'-fluoro nucleoside"
  modified_base 14: mod_base = OTHER; note = "2'-deoxy-3'-fluoro nucleoside"
  modified_base 16: mod_base = OTHER; note = "2'-deoxy-3'-fluoro nucleoside"
  modified_base 18: mod_base = OTHER; note = "2'-deoxy-3'-fluoro nucleoside"
  modified_base 3: mod_base = OTHER; note = "2'-O-Methyl nucleoside"
  modified_base 5: mod_base = OTHER; note = "2'-O-Methyl nucleoside"
  modified_base 7: mod_base = OTHER; note = "2'-O-Methyl nucleoside"
  modified_base 9: mod_base = OTHER; note = "2'-O-Methyl nucleoside"
  modified_base 11..13: mod_base = OTHER; note = "2'-O-Methyl nucleoside"
  modified_base 15: mod_base = OTHER; note = "2'-O-Methyl nucleoside"
  modified_base 17: mod_base = OTHER; note = "2'-O-Methyl nucleoside"
  modified_base 19: mod_base = OTHER; note = "2'-O-Methyl nucleoside"
  modified_base 2..3: mod_base = OTHER; note = "phosphorothioate linked nucleoside"
  modified_base 20..21: mod_base = OTHER; note = "phosphorothioate linked nucleoside"
  modified_base 1: mod_base = OTHER; note = thymine
  modified_base 20: mod_base = OTHER; note = thymine
  modified_base 21: mod_base = OTHER; note = thymine
  source 1..21: mol_type = other RNA
tatgataaaacgccgcagatt

SEQ ID NO: 244 - RNA, 21 nt, synthetic construct
  modified_base 1: mod_base = OTHER; note = thymine
  modified_base 20..21: mod_base = OTHER; note = thymine
  misc_feature 1..21: note = HBV RNAi trigger antisense strand
  modified_base 2: mod_base = OTHER; note = "2'-deoxy-3'-fluoro nucleoside"
  modified_base 4: mod_base = OTHER; note = "2'-deoxy-3'-fluoro nucleoside"
  modified_base 6: mod_base = OTHER; note = "2'-deoxy-3'-fluoro nucleoside"
  modified_base 8: mod_base = OTHER; note = "2'-deoxy-3'-fluoro nucleoside"
  modified_base 10: mod_base = OTHER; note = "2'-deoxy-3'-fluoro nucleoside"
  modified_base 14: mod_base = OTHER; note = "2'-deoxy-3'-fluoro nucleoside"
  modified_base 16: mod_base = OTHER; note = "2'-deoxy-3'-fluoro nucleoside"
  modified_base 18: mod_base = OTHER; note = "2'-deoxy-3'-fluoro nucleoside"
  modified_base 3: mod_base = OTHER; note = "2'-O-Methyl nucleoside"
  modified_base 5: mod_base = OTHER; note = "2'-O-Methyl nucleoside"
  modified_base 7: mod_base = OTHER; note = "2'-O-Methyl nucleoside"
  modified_base 9: mod_base = OTHER; note = "2'-O-Methyl nucleoside"
  modified_base 11..13: mod_base = OTHER; note = "2'-O-Methyl nucleoside"
  modified_base 15: mod_base = OTHER; note = "2'-O-Methyl nucleoside"
  modified_base 17: mod_base = OTHER; note = "2'-O-Methyl nucleoside"
  modified_base 19: mod_base = OTHER; note = "2'-O-Methyl nucleoside"
  modified_base 21: mod_base = OTHER; note = "phosphorothioate linked nucleoside"
  modified_base 1: mod_base = OTHER; note = thymine
  modified_base 20: mod_base = OTHER; note = thymine
  modified_base 21: mod_base = OTHER; note = thymine
  source 1..21: mol_type = other RNA
taccaatttatgcctacagtt

SEQ ID NO: 245 - RNA, 21 nt, synthetic construct
  modified_base 1: mod_base = OTHER; note = thymine
  modified_base 20..21: mod_base = OTHER; note = thymine
  misc_feature 1..21: note = HBV RNAi trigger antisense strand
  modified_base 2: mod_base = OTHER; note = "2'-deoxy-3'-fluoro nucleoside"
  modified_base 4: mod_base = OTHER; note = "2'-deoxy-3'-fluoro nucleoside"
  modified_base 6: mod_base = OTHER; note = "2'-deoxy-3'-fluoro nucleoside"
  modified_base 8: mod_base = OTHER; note = "2'-deoxy-3'-fluoro nucleoside"
  modified_base 10: mod_base = OTHER; note = "2'-deoxy-3'-fluoro nucleoside"
  modified_base 14: mod_base = OTHER; note = "2'-deoxy-3'-fluoro nucleoside"
  modified_base 16: mod_base = OTHER; note = "2'-deoxy-3'-fluoro nucleoside"
  modified_base 18: mod_base = OTHER; note = "2'-deoxy-3'-fluoro nucleoside"
  modified_base 3: mod_base = OTHER; note = "2'-O-Methyl nucleoside"
  modified_base 5: mod_base = OTHER; note = "2'-O-Methyl nucleoside"
  modified_base 7: mod_base = OTHER; note = "2'-O-Methyl nucleoside"
  modified_base 9: mod_base = OTHER; note = "2'-O-Methyl nucleoside"
  modified_base 11..13: mod_base = OTHER; note = "2'-O-Methyl nucleoside"
  modified_base 15: mod_base = OTHER; note = "2'-O-Methyl nucleoside"
  modified_base 17: mod_base = OTHER; note = "2'-O-Methyl nucleoside"
  modified_base 19: mod_base = OTHER; note = "2'-O-Methyl nucleoside"
  modified_base 21: mod_base = OTHER; note = "phosphorothioate linked nucleoside"
  modified_base 1: mod_base = OTHER; note = thymine
  modified_base 20: mod_base = OTHER; note = thymine
  modified_base 21: mod_base = OTHER; note = thymine
  source 1..21: mol_type = other RNA
tagatgattaggcagaggttt

SEQ ID NO: 246 - RNA, 21 nt, synthetic construct
  modified_base 1: mod_base = OTHER; note = thymine
  modified_base 20..21: mod_base = OTHER; note = thymine
  misc_feature 1..21: note = HBV RNAi trigger antisense strand
  modified_base 2: mod_base = OTHER; note = "2'-deoxy-3'-fluoro nucleoside"
  modified_base 4: mod_base = OTHER; note = "2'-deoxy-3'-fluoro nucleoside"
  modified_base 6: mod_base = OTHER; note = "2'-deoxy-3'-fluoro nucleoside"
  modified_base 8: mod_base = OTHER; note = "2'-deoxy-3'-fluoro nucleoside"
  modified_base 10: mod_base = OTHER; note = "2'-deoxy-3'-fluoro nucleoside"
  modified_base 14: mod_base = OTHER; note = "2'-deoxy-3'-fluoro nucleoside"
  modified_base 16: mod_base = OTHER; note = "2'-deoxy-3'-fluoro nucleoside"
  modified_base 18: mod_base = OTHER; note = "2'-deoxy-3'-fluoro nucleoside"
  modified_base 3: mod_base = OTHER; note = "2'-O-Methyl nucleoside"
  modified_base 5: mod_base = OTHER; note = "2'-O-Methyl nucleoside"
  modified_base 7: mod_base = OTHER; note = "2'-O-Methyl nucleoside"
  modified_base 9: mod_base = OTHER; note = "2'-O-Methyl nucleoside"
  modified_base 11..13: mod_base = OTHER; note = "2'-O-Methyl nucleoside"
  modified_base 15: mod_base = OTHER; note = "2'-O-Methyl nucleoside"
  modified_base 17: mod_base = OTHER; note = "2'-O-Methyl nucleoside"
  modified_base 19: mod_base = OTHER; note = "2'-O-Methyl nucleoside"
  modified_base 21: mod_base = OTHER; note = "phosphorothioate linked nucleoside"
  modified_base 1: mod_base = OTHER; note = thymine
  modified_base 20: mod_base = OTHER; note = thymine
  modified_base 21: mod_base = OTHER; note = thymine
  source 1..21: mol_type = other RNA
tacaaatggcactagtaaatt

SEQ ID NO: 247 - RNA, 21 nt, synthetic construct
  modified_base 1: mod_base = OTHER; note = thymine
  modified_base 20..21: mod_base = OTHER; note = thymine
  misc_feature 1..21: note = HBV RNAi trigger antisense strand
  modified_base 2: mod_base = OTHER; note = "2'-deoxy-3'-fluoro nucleoside"
  modified_base 4: mod_base = OTHER; note = "2'-deoxy-3'-fluoro nucleoside"
  modified_base 6: mod_base = OTHER; note = "2'-deoxy-3'-fluoro nucleoside"
  modified_base 8: mod_base = OTHER; note = "2'-deoxy-3'-fluoro nucleoside"
  modified_base 10: mod_base = OTHER; note = "2'-deoxy-3'-fluoro nucleoside"
  modified_base 14: mod_base = OTHER; note = "2'-deoxy-3'-fluoro nucleoside"
  modified_base 16: mod_base = OTHER; note = "2'-deoxy-3'-fluoro nucleoside"
  modified_base 18: mod_base = OTHER; note = "2'-deoxy-3'-fluoro nucleoside"
  modified_base 3: mod_base = OTHER; note = "2'-O-Methyl nucleoside"
  modified_base 5: mod_base = OTHER; note = "2'-O-Methyl nucleoside"
  modified_base 7: mod_base = OTHER; note = "2'-O-Methyl nucleoside"
  modified_base 9: mod_base = OTHER; note = "2'-O-Methyl nucleoside"
  modified_base 11..13: mod_base = OTHER; note = "2'-O-Methyl nucleoside"
  modified_base 15: mod_base = OTHER; note = "2'-O-Methyl nucleoside"
  modified_base 17: mod_base = OTHER; note = "2'-O-Methyl nucleoside"
  modified_base 19: mod_base = OTHER; note = "2'-O-Methyl nucleoside"
  modified_base 21: mod_base = OTHER; note = "phosphorothioate linked nucleoside"
  modified_base 1: mod_base = OTHER; note = thymine
  modified_base 20: mod_base = OTHER; note = thymine
  modified_base 21: mod_base = OTHER; note = thymine
  source 1..21: mol_type = other RNA
tatgataaaacgccgcagatt

SEQ ID NO: 248 - RNA, 26 nt, synthetic construct
  modified_base 1: mod_base = OTHER; note = thymine
  misc_feature 1..26: note = HBV RNAi trigger antisense strand
  modified_base 25: mod_base = OTHER; note = "2'-hydroxy nucleoside"
  modified_base 2: mod_base = OTHER; note = "2'-deoxy-3'-fluoro nucleoside"
  modified_base 4: mod_base = OTHER; note = "2'-deoxy-3'-fluoro nucleoside"
  modified_base 6: mod_base = OTHER; note = "2'-deoxy-3'-fluoro nucleoside"
  modified_base 8: mod_base = OTHER; note = "2'-deoxy-3'-fluoro nucleoside"
  modified_base 10: mod_base = OTHER; note = "2'-deoxy-3'-fluoro nucleoside"
  modified_base 13..14: mod_base = OTHER; note = "2'-deoxy-3'-fluoro nucleoside"
  modified_base 16: mod_base = OTHER; note = "2'-deoxy-3'-fluoro nucleoside"
  modified_base 18: mod_base = OTHER; note = "2'-deoxy-3'-fluoro nucleoside"
  modified_base 20: mod_base = OTHER; note = "2'-deoxy-3'-fluoro nucleoside"
  modified_base 23..24: mod_base = OTHER; note = "2'-deoxy-3'-fluoro nucleoside"
  modified_base 3: mod_base = OTHER; note = "2'-O-Methyl nucleoside"
  modified_base 5: mod_base = OTHER; note = "2'-O-Methyl nucleoside"
  modified_base 7: mod_base = OTHER; note = "2'-O-Methyl nucleoside"
  modified_base 9: mod_base = OTHER; note = "2'-O-Methyl nucleoside"
  modified_base 11..12: mod_base = OTHER; note = "2'-O-Methyl nucleoside"
  modified_base 15: mod_base = OTHER; note = "2'-O-Methyl nucleoside"
  modified_base 17: mod_base = OTHER; note = "2'-O-Methyl nucleoside"
  modified_base 19: mod_base = OTHER; note = "2'-O-Methyl nucleoside"
  modified_base 21: mod_base = OTHER; note = "2'-O-Methyl nucleoside"
  modified_base 22: mod_base = OTHER; note = "2'-O-Methyl nucleoside"
  modified_base 26: mod_base = OTHER; note = "2'-O-Methyl nucleoside"
  modified_base 2..3: mod_base = OTHER; note = "phosphorothioate linked nucleoside"
  modified_base 23..24: mod_base = OTHER; note = "phosphorothioate linked nucleoside"
  modified_base 1: mod_base = OTHER; note = thymine
  source 1..26: mol_type = other RNA
taccaatttatgcctacaggccttat

SEQ ID NO: 249 - RNA, 26 nt, synthetic construct
  modified_base 1: mod_base = OTHER; note = thymine
  misc_feature 1..26: note = HBV RNAi trigger antisense strand
  modified_base 25: mod_base = OTHER; note = "2'-hydroxy nucleoside"
  modified_base 2: mod_base = OTHER; note = "2'-deoxy-3'-fluoro nucleoside"
  modified_base 4: mod_base = OTHER; note = "2'-deoxy-3'-fluoro nucleoside"
  modified_base 6: mod_base = OTHER; note = "2'-deoxy-3'-fluoro nucleoside"
  modified_base 8: mod_base = OTHER; note = "2'-deoxy-3'-fluoro nucleoside"
  modified_base 10: mod_base = OTHER; note = "2'-deoxy-3'-fluoro nucleoside"
  modified_base 13..14: mod_base = OTHER; note = "2'-deoxy-3'-fluoro nucleoside"
  modified_base 16: mod_base = OTHER; note = "2'-deoxy-3'-fluoro nucleoside"
  modified_base 18: mod_base = OTHER; note = "2'-deoxy-3'-fluoro nucleoside"
  modified_base 20: mod_base = OTHER; note = "2'-deoxy-3'-fluoro nucleoside"
  modified_base 23..24: mod_base = OTHER; note = "2'-deoxy-3'-fluoro nucleoside"
  modified_base 3: mod_base = OTHER; note = "2'-O-Methyl nucleoside"
  modified_base 5: mod_base = OTHER; note = "2'-O-Methyl nucleoside"
  modified_base 7: mod_base = OTHER; note = "2'-O-Methyl nucleoside"
  modified_base 9: mod_base = OTHER; note = "2'-O-Methyl nucleoside"
  modified_base 11..12: mod_base = OTHER; note = "2'-O-Methyl nucleoside"
  modified_base 15: mod_base = OTHER; note = "2'-O-Methyl nucleoside"
  modified_base 17: mod_base = OTHER; note = "2'-O-Methyl nucleoside"
  modified_base 19: mod_base = OTHER; note = "2'-O-Methyl nucleoside"
  modified_base 21: mod_base = OTHER; note = "2'-O-Methyl nucleoside"
  modified_base 22: mod_base = OTHER; note = "2'-O-Methyl nucleoside"
  modified_base 26: mod_base = OTHER; note = "2'-O-Methyl nucleoside"
  modified_base 2: mod_base = OTHER; note = "phosphorothioate linked nucleoside"
  modified_base 24: mod_base = OTHER; note = "phosphorothioate linked nucleoside"
  modified_base 1: mod_base = OTHER; note = thymine
  source 1..26: mol_type = other RNA
taccaatttatgcctacaggccttat

SEQ ID NO: 250 - RNA, 26 nt, synthetic construct
  modified_base 1: mod_base = OTHER; note = thymine
  misc_feature 1..26: note = HBV RNAi trigger antisense strand
  modified_base 25: mod_base = OTHER; note = "2'-hydroxy nucleoside"
  modified_base 2: mod_base = OTHER; note = "2'-deoxy-3'-fluoro nucleoside"
  modified_base 4: mod_base = OTHER; note = "2'-deoxy-3'-fluoro nucleoside"
  modified_base 6: mod_base = OTHER; note = "2'-deoxy-3'-fluoro nucleoside"
  modified_base 8: mod_base = OTHER; note = "2'-deoxy-3'-fluoro nucleoside"
  modified_base 10: mod_base = OTHER; note = "2'-deoxy-3'-fluoro nucleoside"
  modified_base 13: mod_base = OTHER; note = "2'-deoxy-3'-fluoro nucleoside"
  modified_base 16: mod_base = OTHER; note = "2'-deoxy-3'-fluoro nucleoside"
  modified_base 18: mod_base = OTHER; note = "2'-deoxy-3'-fluoro nucleoside"
  modified_base 20: mod_base = OTHER; note = "2'-deoxy-3'-fluoro nucleoside"
  modified_base 23..24: mod_base = OTHER; note = "2'-deoxy-3'-fluoro nucleoside"
  modified_base 3: mod_base = OTHER; note = "2'-O-Methyl nucleoside"
  modified_base 5: mod_base = OTHER; note = "2'-O-Methyl nucleoside"
  modified_base 7: mod_base = OTHER; note = "2'-O-Methyl nucleoside"
  modified_base 9: mod_base = OTHER; note = "2'-O-Methyl nucleoside"
  modified_base 11..12: mod_base = OTHER; note = "2'-O-Methyl nucleoside"
  modified_base 14..15: mod_base = OTHER; note = "2'-O-Methyl nucleoside"
  modified_base 17: mod_base = OTHER; note = "2'-O-Methyl nucleoside"
  modified_base 19: mod_base = OTHER; note = "2'-O-Methyl nucleoside"
  modified_base 21: mod_base = OTHER; note = "2'-O-Methyl nucleoside"
  modified_base 22: mod_base = OTHER; note = "2'-O-Methyl nucleoside"
  modified_base 26: mod_base = OTHER; note = "2'-O-Methyl nucleoside"
  modified_base 2..3: mod_base = OTHER; note = "phosphorothioate linked nucleoside"
  modified_base 23..24: mod_base = OTHER; note = "phosphorothioate linked nucleoside"
  modified_base 1: mod_base = OTHER; note = thymine
  source 1..26: mol_type = other RNA
taccaatttatgcctacaggccttat

SEQ ID NO: 251 - RNA, 26 nt, synthetic construct
  modified_base 1: mod_base = OTHER; note = thymine
  misc_feature 1..26: note = HBV RNAi trigger antisense strand
  modified_base 25: mod_base = OTHER; note = "2'-hydroxy nucleoside"
  modified_base 2: mod_base = OTHER; note = "2'-deoxy-3'-fluoro nucleoside"
  modified_base 4: mod_base = OTHER; note = "2'-deoxy-3'-fluoro nucleoside"
  modified_base 6: mod_base = OTHER; note = "2'-deoxy-3'-fluoro nucleoside"
  modified_base 8: mod_base = OTHER; note = "2'-deoxy-3'-fluoro nucleoside"
  modified_base 10: mod_base = OTHER; note = "2'-deoxy-3'-fluoro nucleoside"
  modified_base 13: mod_base = OTHER; note = "2'-deoxy-3'-fluoro nucleoside"
  modified_base 16: mod_base = OTHER; note = "2'-deoxy-3'-fluoro nucleoside"
  modified_base 18: mod_base = OTHER; note = "2'-deoxy-3'-fluoro nucleoside"
  modified_base 20: mod_base = OTHER; note = "2'-deoxy-3'-fluoro nucleoside"
  modified_base 23..24: mod_base = OTHER; note = "2'-deoxy-3'-fluoro nucleoside"
  modified_base 3: mod_base = OTHER; note = "2'-O-Methyl nucleoside"
  modified_base 5: mod_base = OTHER; note = "2'-O-Methyl nucleoside"
  modified_base 7: mod_base = OTHER; note = "2'-O-Methyl nucleoside"
  modified_base 9: mod_base = OTHER; note = "2'-O-Methyl nucleoside"
  modified_base 11..12: mod_base = OTHER; note = "2'-O-Methyl nucleoside"
  modified_base 14..15: mod_base = OTHER; note = "2'-O-Methyl nucleoside"
  modified_base 17: mod_base = OTHER; note = "2'-O-Methyl nucleoside"
  modified_base 19: mod_base = OTHER; note = "2'-O-Methyl nucleoside"
  modified_base 21: mod_base = OTHER; note = "2'-O-Methyl nucleoside"
  modified_base 22: mod_base = OTHER; note = "2'-O-Methyl nucleoside"
  modified_base 26: mod_base = OTHER; note = "2'-O-Methyl nucleoside"
  modified_base 2: mod_base = OTHER; note = "phosphorothioate linked nucleoside"
  modified_base 24: mod_base = OTHER; note = "phosphorothioate linked nucleoside"
  modified_base 1: mod_base = OTHER; note = thymine
  source 1..26: mol_type = other RNA
taccaatttatgcctacaggccttat

SEQ ID NO: 252 - RNA, 26 nt, synthetic construct
  modified_base 1: mod_base = OTHER; note = thymine
  misc_feature 1..26: note = HBV RNAi trigger antisense strand
  modified_base 25: mod_base = OTHER; note = "2'-hydroxy nucleoside"
  modified_base 2: mod_base = OTHER; note = "2'-deoxy-3'-fluoro nucleoside"
  modified_base 4: mod_base = OTHER; note = "2'-deoxy-3'-fluoro nucleoside"
  modified_base 6: mod_base = OTHER; note = "2'-deoxy-3'-fluoro nucleoside"
  modified_base 8: mod_base = OTHER; note = "2'-deoxy-3'-fluoro nucleoside"
  modified_base 10: mod_base = OTHER; note = "2'-deoxy-3'-fluoro nucleoside"
  modified_base 13..14: mod_base = OTHER; note = "2'-deoxy-3'-fluoro nucleoside"
  modified_base 16: mod_base = OTHER; note = "2'-deoxy-3'-fluoro nucleoside"
  modified_base 18: mod_base = OTHER; note = "2'-deoxy-3'-fluoro nucleoside"
  modified_base 20: mod_base = OTHER; note = "2'-deoxy-3'-fluoro nucleoside"
  modified_base 23..24: mod_base = OTHER; note = "2'-deoxy-3'-fluoro nucleoside"
  modified_base 3: mod_base = OTHER; note = "2'-O-Methyl nucleoside"
  modified_base 5: mod_base = OTHER; note = "2'-O-Methyl nucleoside"
  modified_base 7: mod_base = OTHER; note = "2'-O-Methyl nucleoside"
  modified_base 9: mod_base = OTHER; note = "2'-O-Methyl nucleoside"
  modified_base 11..12: mod_base = OTHER; note = "2'-O-Methyl nucleoside"
  modified_base 15: mod_base = OTHER; note = "2'-O-Methyl nucleoside"
  modified_base 17: mod_base = OTHER; note = "2'-O-Methyl nucleoside"
  modified_base 19: mod_base = OTHER; note = "2'-O-Methyl nucleoside"
  modified_base 21: mod_base = OTHER; note = "2'-O-Methyl nucleoside"
  modified_base 22: mod_base = OTHER; note = "2'-O-Methyl nucleoside"
  modified_base 26: mod_base = OTHER; note = "2'-O-Methyl nucleoside"
  modified_base 2..3: mod_base = OTHER; note = "phosphorothioate linked nucleoside"
  modified_base 23..24: mod_base = OTHER; note = "phosphorothioate linked nucleoside"
  modified_base 1: mod_base = OTHER; note = thymine
  source 1..26: mol_type = other RNA
tatgataaaacgccgcagacacatat

SEQ ID NO: 253 - RNA, 26 nt, synthetic construct
  modified_base 1: mod_base = OTHER; note = thymine
  misc_feature 1..26: note = HBV RNAi trigger antisense strand
  modified_base 25: mod_base = OTHER; note = "2'-hydroxy nucleoside"
  modified_base 2: mod_base = OTHER; note = "2'-deoxy-3'-fluoro nucleoside"
  modified_base 4: mod_base = OTHER; note = "2'-deoxy-3'-fluoro nucleoside"
  modified_base 6: mod_base = OTHER; note = "2'-deoxy-3'-fluoro nucleoside"
  modified_base 8: mod_base = OTHER; note = "2'-deoxy-3'-fluoro nucleoside"
  modified_base 10: mod_base = OTHER; note = "2'-deoxy-3'-fluoro nucleoside"
  modified_base 13..14: mod_base = OTHER; note = "2'-deoxy-3'-fluoro nucleoside"
  modified_base 16: mod_base = OTHER; note = "2'-deoxy-3'-fluoro nucleoside"
  modified_base 18: mod_base = OTHER; note = "2'-deoxy-3'-fluoro nucleoside"
  modified_base 20: mod_base = OTHER; note = "2'-deoxy-3'-fluoro nucleoside"
  modified_base 23..24: mod_base = OTHER; note = "2'-deoxy-3'-fluoro nucleoside"
  modified_base 3: mod_base = OTHER; note = "2'-O-Methyl nucleoside"
  modified_base 5: mod_base = OTHER; note = "2'-O-Methyl nucleoside"
  modified_base 7: mod_base = OTHER; note = "2'-O-Methyl nucleoside"
  modified_base 9: mod_base = OTHER; note = "2'-O-Methyl nucleoside"
  modified_base 11..12: mod_base = OTHER; note = "2'-O-Methyl nucleoside"
  modified_base 15: mod_base = OTHER; note = "2'-O-Methyl nucleoside"
  modified_base 17: mod_base = OTHER; note = "2'-O-Methyl nucleoside"
  modified_base 19: mod_base = OTHER; note = "2'-O-Methyl nucleoside"
  modified_base 21: mod_base = OTHER; note = "2'-O-Methyl nucleoside"
  modified_base 22: mod_base = OTHER; note = "2'-O-Methyl nucleoside"
  modified_base 26: mod_base = OTHER; note = "2'-O-Methyl nucleoside"
  modified_base 2: mod_base = OTHER; note = "phosphorothioate linked nucleoside"
  modified_base 24: mod_base = OTHER; note = "phosphorothioate linked nucleoside"
  modified_base 1: mod_base = OTHER; note = thymine
  source 1..26: mol_type = other RNA
tatgataaaacgccgcagacacatat

SEQ ID NO: 254 - RNA, 26 nt, synthetic construct
  modified_base 1: mod_base = OTHER; note = thymine
  misc_feature 1..26: note = HBV RNAi trigger antisense strand
  modified_base 25: mod_base = OTHER; note = "2'-hydroxy nucleoside"
  modified_base 2: mod_base = OTHER; note = "2'-deoxy-3'-fluoro nucleoside"
  modified_base 4: mod_base = OTHER; note = "2'-deoxy-3'-fluoro nucleoside"
  modified_base 6: mod_base = OTHER; note = "2'-deoxy-3'-fluoro nucleoside"
  modified_base 8: mod_base = OTHER; note = "2'-deoxy-3'-fluoro nucleoside"
  modified_base 10: mod_base = OTHER; note = "2'-deoxy-3'-fluoro nucleoside"
  modified_base 13: mod_base = OTHER; note = "2'-deoxy-3'-fluoro nucleoside"
  modified_base 16: mod_base = OTHER; note = "2'-deoxy-3'-fluoro nucleoside"
  modified_base 18: mod_base = OTHER; note = "2'-deoxy-3'-fluoro nucleoside"
  modified_base 20: mod_base = OTHER; note = "2'-deoxy-3'-fluoro nucleoside"
  modified_base 23..24: mod_base = OTHER; note = "2'-deoxy-3'-fluoro nucleoside"
  modified_base 3: mod_base = OTHER; note = "2'-O-Methyl nucleoside"
  modified_base 5: mod_base = OTHER; note = "2'-O-Methyl nucleoside"
  modified_base 7: mod_base = OTHER; note = "2'-O-Methyl nucleoside"
  modified_base 9: mod_base = OTHER; note = "2'-O-Methyl nucleoside"
  modified_base 11..12: mod_base = OTHER; note = "2'-O-Methyl nucleoside"
  modified_base 14..15: mod_base = OTHER; note = "2'-O-Methyl nucleoside"
  modified_base 17: mod_base = OTHER; note = "2'-O-Methyl nucleoside"
  modified_base 19: mod_base = OTHER; note = "2'-O-Methyl nucleoside"
  modified_base 21: mod_base = OTHER; note = "2'-O-Methyl nucleoside"
  modified_base 22: mod_base = OTHER; note = "2'-O-Methyl nucleoside"
  modified_base 26: mod_base = OTHER; note = "2'-O-Methyl nucleoside"
  modified_base 2..3: mod_base = OTHER; note = "phosphorothioate linked nucleoside"
  modified_base 23..24: mod_base = OTHER; note = "phosphorothioate linked nucleoside"
  modified_base 1: mod_base = OTHER; note = thymine
  source 1..26: mol_type = other RNA
tatgataaaacgccgcagacacatat

SEQ ID NO: 255 - RNA, 26 nt, synthetic construct
  modified_base 1: mod_base = OTHER; note = thymine
  misc_feature 1..26: note = HBV RNAi trigger antisense strand
  modified_base 25: mod_base = OTHER; note = "2'-hydroxy nucleoside"
  modified_base 2: mod_base = OTHER; note = "2'-deoxy-3'-fluoro nucleoside"
  modified_base 4: mod_base = OTHER; note = "2'-deoxy-3'-fluoro nucleoside"
  modified_base 6: mod_base = OTHER; note = "2'-deoxy-3'-fluoro nucleoside"
  modified_base 8: mod_base = OTHER; note = "2'-deoxy-3'-fluoro nucleoside"
  modified_base 10: mod_base = OTHER; note = "2'-deoxy-3'-fluoro nucleoside"
  modified_base 13: mod_base = OTHER; note = "2'-deoxy-3'-fluoro nucleoside"
  modified_base 16: mod_base = OTHER; note = "2'-deoxy-3'-fluoro nucleoside"
  modified_base 18: mod_base = OTHER; note = "2'-deoxy-3'-fluoro nucleoside"
  modified_base 20: mod_base = OTHER; note = "2'-deoxy-3'-fluoro nucleoside"
  modified_base 23..24: mod_base = OTHER; note = "2'-deoxy-3'-fluoro nucleoside"
  modified_base 3: mod_base = OTHER; note = "2'-O-Methyl nucleoside"
  modified_base 5: mod_base = OTHER; note = "2'-O-Methyl nucleoside"
  modified_base 7: mod_base = OTHER; note = "2'-O-Methyl nucleoside"
  modified_base 9: mod_base = OTHER; note = "2'-O-Methyl nucleoside"
  modified_base 11..12: mod_base = OTHER; note = "2'-O-Methyl nucleoside"
  modified_base 14..15: mod_base = OTHER; note = "2'-O-Methyl nucleoside"
  modified_base 17: mod_base = OTHER; note = "2'-O-Methyl nucleoside"
  modified_base 19: mod_base = OTHER; note = "2'-O-Methyl nucleoside"
  modified_base 21: mod_base = OTHER; note = "2'-O-Methyl nucleoside"
  modified_base 22: mod_base = OTHER; note = "2'-O-Methyl nucleoside"
  modified_base 26: mod_base = OTHER; note = "2'-O-Methyl nucleoside"
  modified_base 2: mod_base = OTHER; note = "phosphorothioate linked nucleoside"
  modified_base 24: mod_base = OTHER; note = "phosphorothioate linked nucleoside"
  modified_base 1: mod_base = OTHER; note = thymine
  source 1..26: mol_type = other RNA
tatgataaaacgccgcagacacatat

SEQ ID NO: 256 - RNA, 26 nt, synthetic construct
  modified_base 1: mod_base = OTHER; note = thymine
  misc_feature 1..26: note = HBV RNAi trigger antisense strand
  modified_base 25: mod_base = OTHER; note = "2'-hydroxy nucleoside"
  modified_base 2: mod_base = OTHER; note = "2'-deoxy-3'-fluoro nucleoside"
  modified_base 4: mod_base = OTHER; note = "2'-deoxy-3'-fluoro nucleoside"
  modified_base 6: mod_base = OTHER; note = "2'-deoxy-3'-fluoro nucleoside"
  modified_base 8: mod_base = OTHER; note = "2'-deoxy-3'-fluoro nucleoside"
  modified_base 10: mod_base = OTHER; note = "2'-deoxy-3'-fluoro nucleoside"
  modified_base 13..14: mod_base = OTHER; note = "2'-deoxy-3'-fluoro nucleoside"
  modified_base 16: mod_base = OTHER; note = "2'-deoxy-3'-fluoro nucleoside"
  modified_base 18: mod_base = OTHER; note = "2'-deoxy-3'-fluoro nucleoside"
  modified_base 20: mod_base = OTHER; note = "2'-deoxy-3'-fluoro nucleoside"
  modified_base 23..24: mod_base = OTHER; note = "2'-deoxy-3'-fluoro nucleoside"
  modified_base 3: mod_base = OTHER; note = "2'-O-Methyl nucleoside"
  modified_base 5: mod_base = OTHER; note = "2'-O-Methyl nucleoside"
  modified_base 7: mod_base = OTHER; note = "2'-O-Methyl nucleoside"
  modified_base 9: mod_base = OTHER; note = "2'-O-Methyl nucleoside"
  modified_base 11..12: mod_base = OTHER; note = "2'-O-Methyl nucleoside"
  modified_base 15: mod_base = OTHER; note = "2'-O-Methyl nucleoside"
  modified_base 17: mod_base = OTHER; note = "2'-O-Methyl nucleoside"
  modified_base 19: mod_base = OTHER; note = "2'-O-Methyl nucleoside"
  modified_base 21: mod_base = OTHER; note = "2'-O-Methyl nucleoside"
  modified_base 22: mod_base = OTHER; note = "2'-O-Methyl nucleoside"
  modified_base 26: mod_base = OTHER; note = "2'-O-Methyl nucleoside"
  modified_base 2..3: mod_base = OTHER; note = "phosphorothioate linked nucleoside"
  modified_base 23..24: mod_base = OTHER; note = "phosphorothioate linked nucleoside"
  modified_base 1: mod_base = OTHER; note = thymine
  source 1..26: mol_type = other RNA
tagatgattaggcagaggttgaatat

SEQ ID NO: 257 - RNA, 26 nt, synthetic construct
  modified_base 1: mod_base = OTHER; note = thymine
  misc_feature 1..26: note = HBV RNAi trigger antisense strand
  modified_base 25: mod_base = OTHER; note = "2'-hydroxy nucleoside"
  modified_base 2: mod_base = OTHER; note = "2'-deoxy-3'-fluoro nucleoside"
  modified_base 4: mod_base = OTHER; note = "2'-deoxy-3'-fluoro nucleoside"
  modified_base 6: mod_base = OTHER; note = "2'-deoxy-3'-fluoro nucleoside"
  modified_base 8: mod_base = OTHER; note = "2'-deoxy-3'-fluoro nucleoside"
  modified_base 10: mod_base = OTHER; note = "2'-deoxy-3'-fluoro nucleoside"
  modified_base 13..14: mod_base = OTHER; note = "2'-deoxy-3'-fluoro nucleoside"
  modified_base 16: mod_base = OTHER; note = "2'-deoxy-3'-fluoro nucleoside"
  modified_base 18: mod_base = OTHER; note = "2'-deoxy-3'-fluoro nucleoside"
  modified_base 20: mod_base = OTHER; note = "2'-deoxy-3'-fluoro nucleoside"
  modified_base 23..24: mod_base = OTHER; note = "2'-deoxy-3'-fluoro nucleoside"
  modified_base 3: mod_base = OTHER; note = "2'-O-Methyl nucleoside"
  modified_base 5: mod_base = OTHER; note = "2'-O-Methyl nucleoside"
  modified_base 7: mod_base = OTHER; note = "2'-O-Methyl nucleoside"
  modified_base 9: mod_base = OTHER; note = "2'-O-Methyl nucleoside"
  modified_base 11..12: mod_base = OTHER; note = "2'-O-Methyl nucleoside"
  modified_base 15: mod_base = OTHER; note = "2'-O-Methyl nucleoside"
  modified_base 17: mod_base = OTHER; note = "2'-O-Methyl nucleoside"
  modified_base 19: mod_base = OTHER; note = "2'-O-Methyl nucleoside"
  modified_base 21: mod_base = OTHER; note = "2'-O-Methyl nucleoside"
  modified_base 22: mod_base = OTHER; note = "2'-O-Methyl nucleoside"
  modified_base 26: mod_base = OTHER; note = "2'-O-Methyl nucleoside"
  modified_base 2: mod_base = OTHER; note = "phosphorothioate linked nucleoside"
  modified_base 24: mod_base = OTHER; note = "phosphorothioate linked nucleoside"
  modified_base 1: mod_base = OTHER; note = thymine
  source 1..26: mol_type = other RNA
tagatgattaggcagaggttgaatat

SEQ ID NO: 258 - RNA, 26 nt, synthetic construct
  modified_base 1: mod_base = OTHER; note = thymine
  misc_feature 1..26: note = HBV RNAi trigger antisense strand
  modified_base 25: mod_base = OTHER; note = "2'-hydroxy nucleoside"
  modified_base 2: mod_base = OTHER; note = "2'-deoxy-3'-fluoro nucleoside"
  modified_base 4: mod_base = OTHER; note = "2'-deoxy-3'-fluoro nucleoside"
  modified_base 6: mod_base = OTHER; note = "2'-deoxy-3'-fluoro nucleoside"
  modified_base 8: mod_base = OTHER; note = "2'-deoxy-3'-fluoro nucleoside"
  modified_base 10: mod_base = OTHER; note = "2'-deoxy-3'-fluoro nucleoside"
  modified_base 13: mod_base = OTHER; note = "2'-deoxy-3'-fluoro nucleoside"
  modified_base 16: mod_base = OTHER; note = "2'-deoxy-3'-fluoro nucleoside"
  modified_base 18: mod_base = OTHER; note = "2'-deoxy-3'-fluoro nucleoside"
  modified_base 20: mod_base = OTHER; note = "2'-deoxy-3'-fluoro nucleoside"
  modified_base 23..24: mod_base = OTHER; note = "2'-deoxy-3'-fluoro nucleoside"
  modified_base 3: mod_base = OTHER; note = "2'-O-Methyl nucleoside"
  modified_base 5: mod_base = OTHER; note = "2'-O-Methyl nucleoside"
  modified_base 7: mod_base = OTHER; note = "2'-O-Methyl nucleoside"
  modified_base 9: mod_base = OTHER; note = "2'-O-Methyl nucleoside"
  modified_base 11..12: mod_base = OTHER; note = "2'-O-Methyl nucleoside"
  modified_base 14..15: mod_base = OTHER; note = "2'-O-Methyl nucleoside"
  modified_base 17: mod_base = OTHER; note = "2'-O-Methyl nucleoside"
  modified_base 19: mod_base = OTHER; note = "2'-O-Methyl nucleoside"
  modified_base 21: mod_base = OTHER; note = "2'-O-Methyl nucleoside"
  modified_base 22: mod_base = OTHER; note = "2'-O-Methyl nucleoside"
  modified_base 26: mod_base = OTHER; note = "2'-O-Methyl nucleoside"
  modified_base 2..3: mod_base = OTHER; note = "phosphorothioate linked nucleoside"
  modified_base 23..24: mod_base = OTHER; note = "phosphorothioate linked nucleoside"
  modified_base 1: mod_base = OTHER; note = thymine
  source 1..26: mol_type = other RNA
tagatgattaggcagaggttgaatat

SEQ ID NO: 259 - RNA, 26 nt, synthetic construct
  modified_base 1: mod_base = OTHER; note = thymine
  misc_feature 1..26: note = HBV RNAi trigger antisense strand
  modified_base 25: mod_base = OTHER; note = "2'-hydroxy nucleoside"
  modified_base 2: mod_base = OTHER; note = "2'-deoxy-3'-fluoro nucleoside"
  modified_base 4: mod_base = OTHER; note = "2'-deoxy-3'-fluoro nucleoside"
  modified_base 6: mod_base = OTHER; note = "2'-deoxy-3'-fluoro nucleoside"
  modified_base 8: mod_base = OTHER; note = "2'-deoxy-3'-fluoro nucleoside"
  modified_base 10: mod_base = OTHER; note = "2'-deoxy-3'-fluoro nucleoside"
  modified_base 13: mod_base = OTHER; note = "2'-deoxy-3'-fluoro nucleoside"
  modified_base 16: mod_base = OTHER; note = "2'-deoxy-3'-fluoro nucleoside"
  modified_base 18: mod_base = OTHER; note = "2'-deoxy-3'-fluoro nucleoside"
  modified_base 20: mod_base = OTHER; note = "2'-deoxy-3'-fluoro nucleoside"
  modified_base 23..24: mod_base = OTHER; note = "2'-deoxy-3'-fluoro nucleoside"
  modified_base 3: mod_base = OTHER; note = "2'-O-Methyl nucleoside"
  modified_base 5: mod_base = OTHER; note = "2'-O-Methyl nucleoside"
  modified_base 7: mod_base = OTHER; note = "2'-O-Methyl nucleoside"
  modified_base 9: mod_base = OTHER; note = "2'-O-Methyl nucleoside"
  modified_base 11..12: mod_base = OTHER; note = "2'-O-Methyl nucleoside"
  modified_base 14..15: mod_base = OTHER; note = "2'-O-Methyl nucleoside"
  modified_base 17: mod_base = OTHER; note = "2'-O-Methyl nucleoside"
  modified_base 19: mod_base = OTHER; note = "2'-O-Methyl nucleoside"
  modified_base 21: mod_base = OTHER; note = "2'-O-Methyl nucleoside"
  modified_base 22: mod_base = OTHER; note = "2'-O-Methyl nucleoside"
  modified_base 26: mod_base = OTHER; note = "2'-O-Methyl nucleoside"
  modified_base 2: mod_base = OTHER; note = "phosphorothioate linked nucleoside"
  modified_base 24: mod_base = OTHER; note = "phosphorothioate linked nucleoside"
  modified_base 1: mod_base = OTHER; note = thymine
  source 1..26: mol_type = other RNA
tagatgattaggcagaggttgaatat

SEQ ID NO: 260 - RNA, 21 nt, synthetic construct
  modified_base 1: mod_base = OTHER; note = thymine
  modified_base 20..21: mod_base = OTHER; note = thymine
  misc_feature 1..21: note = HBV RNAi trigger antisense strand
  modified_base 2: mod_base = OTHER; note = "2'-deoxy-3'-fluoro nucleoside"
  modified_base 4: mod_base = OTHER; note = "2'-deoxy-3'-fluoro nucleoside"
  modified_base 6: mod_base = OTHER; note = "2'-deoxy-3'-fluoro nucleoside"
  modified_base 8: mod_base = OTHER; note = "2'-deoxy-3'-fluoro nucleoside"
  modified_base 10: mod_base = OTHER; note = "2'-deoxy-3'-fluoro nucleoside"
  modified_base 14: mod_base = OTHER; note = "2'-deoxy-3'-fluoro nucleoside"
  modified_base 16: mod_base = OTHER; note = "2'-deoxy-3'-fluoro nucleoside"
  modified_base 18: mod_base = OTHER; note = "2'-deoxy-3'-fluoro nucleoside"
  modified_base 3: mod_base = OTHER; note = "2'-O-Methyl nucleoside"
  modified_base 5: mod_base = OTHER; note = "2'-O-Methyl nucleoside"
  modified_base 7: mod_base = OTHER; note = "2'-O-Methyl nucleoside"
  modified_base 9: mod_base = OTHER; note = "2'-O-Methyl nucleoside"
  modified_base 11..13: mod_base = OTHER; note = "2'-O-Methyl nucleoside"
  modified_base 15: mod_base = OTHER; note = "2'-O-Methyl nucleoside"
  modified_base 17: mod_base = OTHER; note = "2'-O-Methyl nucleoside"
  modified_base 19: mod_base = OTHER; note = "2'-O-Methyl nucleoside"
  modified_base 2..3: mod_base = OTHER; note = "phosphorothioate linked nucleoside"
  modified_base 21: mod_base = OTHER; note = "phosphorothioate linked nucleoside"
  modified_base 1: mod_base = OTHER; note = thymine
  modified_base 20: mod_base = OTHER; note = thymine
  modified_base 21: mod_base = OTHER; note = thymine
  source 1..21: mol_type = other RNA
taccaatttatgcctacagtt

SEQ ID NO: 261 - RNA, 21 nt, synthetic construct
  modified_base 1: mod_base = OTHER; note = thymine
  modified_base 20..21: mod_base = OTHER; note = thymine
  misc_feature 1..21: note = HBV RNAi trigger antisense strand
  modified_base 2: mod_base = OTHER; note = "2'-deoxy-3'-fluoro nucleoside"
  modified_base 4: mod_base = OTHER; note = "2'-deoxy-3'-fluoro nucleoside"
  modified_base 6: mod_base = OTHER; note = "2'-deoxy-3'-fluoro nucleoside"
  modified_base 8: mod_base = OTHER; note = "2'-deoxy-3'-fluoro nucleoside"
  modified_base 10: mod_base = OTHER; note = "2'-deoxy-3'-fluoro nucleoside"
  modified_base 14: mod_base = OTHER; note = "2'-deoxy-3'-fluoro nucleoside"
  modified_base 16: mod_base = OTHER; note = "2'-deoxy-3'-fluoro nucleoside"
  modified_base 18: mod_base = OTHER; note = "2'-deoxy-3'-fluoro nucleoside"
  modified_base 3: mod_base = OTHER; note = "2'-O-Methyl nucleoside"
  modified_base 5: mod_base = OTHER; note = "2'-O-Methyl nucleoside"
  modified_base 7: mod_base = OTHER; note = "2'-O-Methyl nucleoside"
  modified_base 9: mod_base = OTHER; note = "2'-O-Methyl nucleoside"
  modified_base 11..13: mod_base = OTHER; note = "2'-O-Methyl nucleoside"
  modified_base 15: mod_base = OTHER; note = "2'-O-Methyl nucleoside"
  modified_base 17: mod_base = OTHER; note = "2'-O-Methyl nucleoside"
  modified_base 19: mod_base = OTHER; note = "2'-O-Methyl nucleoside"
  modified_base 2..3: mod_base = OTHER; note = "phosphorothioate linked nucleoside"
  modified_base 21: mod_base = OTHER; note = "phosphorothioate linked nucleoside"
  modified_base 1: mod_base = OTHER; note = thymine
  modified_base 20: mod_base = OTHER; note = thymine
  modified_base 21: mod_base = OTHER; note = thymine
  source 1..21: mol_type = other RNA
tatgataaaacgccgcagatt

SEQ ID NO: 262 - RNA, 21 nt, synthetic construct
  modified_base 1: mod_base = OTHER; note = thymine
  modified_base 20..21: mod_base = OTHER; note = thymine
  misc_feature 1..21: note = HBV RNAi trigger antisense strand
  modified_base 2: mod_base = OTHER; note = "2'-deoxy-3'-fluoro nucleoside"
  modified_base 4: mod_base = OTHER; note = "2'-deoxy-3'-fluoro nucleoside"
  modified_base 6: mod_base = OTHER; note = "2'-deoxy-3'-fluoro nucleoside"
  modified_base 8: mod_base = OTHER; note = "2'-deoxy-3'-fluoro nucleoside"
  modified_base 10: mod_base = OTHER; note = "2'-deoxy-3'-fluoro nucleoside"
  modified_base 14: mod_base = OTHER; note = "2'-deoxy-3'-fluoro nucleoside"
  modified_base 16: mod_base = OTHER; note = "2'-deoxy-3'-fluoro nucleoside"
  modified_base 18: mod_base = OTHER; note = "2'-deoxy-3'-fluoro nucleoside"
  modified_base 3: mod_base = OTHER; note = "2'-O-Methyl nucleoside"
  modified_base 5: mod_base = OTHER; note = "2'-O-Methyl nucleoside"
  modified_base 7: mod_base = OTHER; note = "2'-O-Methyl nucleoside"
  modified_base 9: mod_base = OTHER; note = "2'-O-Methyl nucleoside"
  modified_base 11..13: mod_base = OTHER; note = "2'-O-Methyl nucleoside"
  modified_base 15: mod_base = OTHER; note = "2'-O-Methyl nucleoside"
  modified_base 17: mod_base = OTHER; note = "2'-O-Methyl nucleoside"
  modified_base 19: mod_base = OTHER; note = "2'-O-Methyl nucleoside"
  modified_base 2..3: mod_base = OTHER; note = "phosphorothioate linked nucleoside"
  modified_base 21: mod_base = OTHER; note = "phosphorothioate linked nucleoside"
  modified_base 1: mod_base = OTHER; note = thymine
  modified_base 20: mod_base = OTHER; note = thymine
  modified_base 21: mod_base = OTHER; note = thymine
  source 1..21: mol_type = other RNA
tagatgattaggcagaggttt

SEQ ID NO: 263 - RNA, 21 nt, synthetic construct
  modified_base 1: mod_base = OTHER; note = thymine
  modified_base 20..21: mod_base = OTHER; note = thymine
  misc_feature 1..21: note = HBV RNAi trigger antisense strand
  modified_base 2: mod_base = OTHER; note = "2'-deoxy-3'-fluoro nucleoside"
  modified_base 4: mod_base = OTHER; note = "2'-deoxy-3'-fluoro nucleoside"
  modified_base 6: mod_base = OTHER; note = "2'-deoxy-3'-fluoro nucleoside"
  modified_base 8: mod_base = OTHER; note = "2'-deoxy-3'-fluoro nucleoside"
  modified_base 10: mod_base = OTHER; note = "2'-deoxy-3'-fluoro nucleoside"
  modified_base 14: mod_base = OTHER; note = "2'-deoxy-3'-fluoro nucleoside"
  modified_base 16: mod_base = OTHER; note = "2'-deoxy-3'-fluoro nucleoside"
  modified_base 18: mod_base = OTHER; note = "2'-deoxy-3'-fluoro nucleoside"
  modified_base 3: mod_base = OTHER; note = "2'-O-Methyl nucleoside"
  modified_base 5: mod_base = OTHER; note = "2'-O-Methyl nucleoside"
  modified_base 7: mod_base = OTHER; note = "2'-O-Methyl nucleoside"
  modified_base 9: mod_base = OTHER; note = "2'-O-Methyl nucleoside"
  modified_base 11..13: mod_base = OTHER; note = "2'-O-Methyl nucleoside"
  modified_base 15: mod_base = OTHER; note = "2'-O-Methyl nucleoside"
  modified_base 17: mod_base = OTHER; note = "2'-O-Methyl nucleoside"
  modified_base 19: mod_base = OTHER; note = "2'-O-Methyl nucleoside"
  modified_base 21: mod_base = OTHER; note = "phosphorothioate linked nucleoside"
  modified_base 1: mod_base = OTHER; note = "phosphate modified nucleoside"
  modified_base 1: mod_base = OTHER; note = thymine
  modified_base 20: mod_base = OTHER; note = thymine
  modified_base 21: mod_base = OTHER; note = thymine
  source 1..21: mol_type = other RNA
tatgataaaacgccgcagatt

SEQ ID NO: 264 - RNA, 21 nt, synthetic construct
  modified_base 1: mod_base = OTHER; note = thymine
  modified_base 20..21: mod_base = OTHER; note = thymine
  misc_feature 1..21: note = HBV RNAi trigger antisense strand
  modified_base 2: mod_base = OTHER; note = "2'-deoxy-3'-fluoro nucleoside"
  modified_base 4: mod_base = OTHER; note = "2'-deoxy-3'-fluoro nucleoside"
  modified_base 6: mod_base = OTHER; note = "2'-deoxy-3'-fluoro nucleoside"
  modified_base 8: mod_base = OTHER; note = "2'-deoxy-3'-fluoro nucleoside"
  modified_base 10: mod_base = OTHER; note = "2'-deoxy-3'-fluoro nucleoside"
  modified_base 12: mod_base = OTHER; note = "2'-deoxy-3'-fluoro nucleoside"
  modified_base 14: mod_base = OTHER; note = "2'-deoxy-3'-fluoro nucleoside"
  modified_base 16: mod_base = OTHER; note = "2'-deoxy-3'-fluoro nucleoside"
  modified_base 18: mod_base = OTHER; note = "2'-deoxy-3'-fluoro nucleoside"
  modified_base 3: mod_base = OTHER; note = "2'-O-Methyl nucleoside"
  modified_base 5: mod_base = OTHER; note = "2'-O-Methyl nucleoside"
  modified_base 7: mod_base = OTHER; note = "2'-O-Methyl nucleoside"
  modified_base 9: mod_base = OTHER; note = "2'-O-Methyl nucleoside"
  modified_base 11: mod_base = OTHER; note = "2'-O-Methyl nucleoside"
  modified_base 13: mod_base = OTHER; note = "2'-O-Methyl nucleoside"
  modified_base 15: mod_base = OTHER; note = "2'-O-Methyl nucleoside"
  modified_base 17: mod_base = OTHER; note = "2'-O-Methyl nucleoside"
  modified_base 19: mod_base = OTHER; note = "2'-O-Methyl nucleoside"
  modified_base 21: mod_base = OTHER; note = "phosphorothioate linked nucleoside"
  modified_base 1: mod_base = OTHER; note = "phosphate modified nucleoside"
  modified_base 1: mod_base = OTHER; note = thymine
  modified_base 20: mod_base = OTHER; note = thymine
  modified_base 21: mod_base = OTHER; note = thymine
  source 1..21: mol_type = other RNA
tatgataaaacgccgcagatt

SEQ ID NO: 265 - RNA, 21 nt, synthetic construct
  modified_base 1: mod_base = OTHER; note = thymine
  modified_base 20..21: mod_base = OTHER; note = thymine
  misc_feature 1..21: note = HBV RNAi trigger antisense strand
  modified_base 2: mod_base = OTHER; note = "2'-deoxy-3'-fluoro nucleoside"
  modified_base 4: mod_base = OTHER; note = "2'-deoxy-3'-fluoro nucleoside"
  modified_base 6: mod_base = OTHER; note = "2'-deoxy-3'-fluoro nucleoside"
  modified_base 8: mod_base = OTHER; note = "2'-deoxy-3'-fluoro nucleoside"
  modified_base 10: mod_base = OTHER; note = "2'-deoxy-3'-fluoro nucleoside"
  modified_base 14: mod_base = OTHER; note = "2'-deoxy-3'-fluoro nucleoside"
  modified_base 16: mod_base = OTHER; note = "2'-deoxy-3'-fluoro nucleoside"
  modified_base 18: mod_base = OTHER; note = "2'-deoxy-3'-fluoro nucleoside"
  modified_base 3: mod_base = OTHER; note = "2'-O-Methyl nucleoside"
  modified_base 5: mod_base = OTHER; note = "2'-O-Methyl nucleoside"
  modified_base 7: mod_base = OTHER; note = "2'-O-Methyl nucleoside"
  modified_base 9: mod_base = OTHER; note = "2'-O-Methyl nucleoside"
  modified_base 11..13: mod_base = OTHER; note = "2'-O-Methyl nucleoside"
  modified_base 15: mod_base = OTHER; note = "2'-O-Methyl nucleoside"
  modified_base 17: mod_base = OTHER; note = "2'-O-Methyl nucleoside"
  modified_base 19: mod_base = OTHER; note = "2'-O-Methyl nucleoside"
  modified_base 21: mod_base = OTHER; note = "phosphorothioate linked nucleoside"
  modified_base 1: mod_base = OTHER; note = "phosphate modified nucleoside"
  modified_base 1: mod_base = OTHER; note = thymine
  modified_base 20: mod_base = OTHER; note = thymine
  modified_base 21: mod_base = OTHER; note = thymine
  source 1..21: mol_type = other RNA
taccaatttatgcctacagtt

SEQ ID NO: 266 - RNA, 21 nt, synthetic construct
  modified_base 1: mod_base = OTHER; note = thymine
  modified_base 20..21: mod_base = OTHER; note = thymine
  misc_feature 1..21: note = HBV RNAi trigger antisense strand
  modified_base 2: mod_base = OTHER; note = "2'-deoxy-3'-fluoro nucleoside"
  modified_base 4: mod_base = OTHER; note = "2'-deoxy-3'-fluoro nucleoside"
  modified_base 6: mod_base = OTHER; note = "2'-deoxy-3'-fluoro nucleoside"
  modified_base 8: mod_base = OTHER; note = "2'-deoxy-3'-fluoro nucleoside"
  modified_base 10: mod_base = OTHER; note = "2'-deoxy-3'-fluoro nucleoside"
  modified_base 14: mod_base = OTHER; note = "2'-deoxy-3'-fluoro nucleoside"
  modified_base 16: mod_base = OTHER; note = "2'-deoxy-3'-fluoro nucleoside"
  modified_base 18: mod_base = OTHER; note = "2'-deoxy-3'-fluoro nucleoside"
  modified_base 3: mod_base = OTHER; note = "2'-O-Methyl nucleoside"
  modified_base 5: mod_base = OTHER; note = "2'-O-Methyl nucleoside"
  modified_base 7: mod_base = OTHER; note = "2'-O-Methyl nucleoside"
  modified_base 9: mod_base = OTHER; note = "2'-O-Methyl nucleoside"
  modified_base 11..13: mod_base = OTHER; note = "2'-O-Methyl nucleoside"
  modified_base 15: mod_base = OTHER; note = "2'-O-Methyl nucleoside"
  modified_base 17: mod_base = OTHER; note = "2'-O-Methyl nucleoside"
  modified_base 19: mod_base = OTHER; note = "2'-O-Methyl nucleoside"
  modified_base 21: mod_base = OTHER; note = "phosphorothioate linked nucleoside"
  modified_base 1: mod_base = OTHER; note = "phosphate modified nucleoside"
  modified_base 1: mod_base = OTHER; note = thymine
  modified_base 20: mod_base = OTHER; note = thymine
  modified_base 21: mod_base = OTHER; note = thymine
  source 1..21: mol_type = other RNA
tagatgattaggcagaggttt

SEQ ID NO: 267 - RNA, 26 nt, synthetic construct
  misc_feature 1..26: note = HBV RNAi trigger antisense strand
  modified_base 25: mod_base = OTHER; note = "2'-hydroxy nucleoside"
  modified_base 2: mod_base = OTHER; note = "2'-deoxy-3'-fluoro nucleoside"
  modified_base 4: mod_base = OTHER; note = "2'-deoxy-3'-fluoro nucleoside"
  modified_base 6: mod_base = OTHER; note = "2'-deoxy-3'-fluoro nucleoside"
  modified_base 8: mod_base = OTHER; note = "2'-deoxy-3'-fluoro nucleoside"
  modified_base 10: mod_base = OTHER; note = "2'-deoxy-3'-fluoro nucleoside"
  modified_base 13..14: mod_base = OTHER; note = "2'-deoxy-3'-fluoro nucleoside"
  modified_base 16: mod_base = OTHER; note = "2'-deoxy-3'-fluoro nucleoside"
  modified_base 18: mod_base = OTHER; note = "2'-deoxy-3'-fluoro nucleoside"
  modified_base 20: mod_base = OTHER; note = "2'-deoxy-3'-fluoro nucleoside"
  modified_base 22: mod_base = OTHER; note = "2'-deoxy-3'-fluoro nucleoside"
  modified_base 1: mod_base = OTHER; note = "2'-O-Methyl nucleoside"
  modified_base 3: mod_base = OTHER; note = "2'-O-Methyl nucleoside"
  modified_base 5: mod_base = OTHER; note = "2'-O-Methyl nucleoside"
  modified_base 7: mod_base = OTHER; note = "2'-O-Methyl nucleoside"
  modified_base 9: mod_base = OTHER; note = "2'-O-Methyl nucleoside"
  modified_base 11..12: mod_base = OTHER; note = "2'-O-Methyl nucleoside"
  modified_base 15: mod_base = OTHER; note = "2'-O-Methyl nucleoside"
  modified_base 17: mod_base = OTHER; note = "2'-O-Methyl nucleoside"
  modified_base 19: mod_base = OTHER; note = "2'-O-Methyl nucleoside"
  modified_base 21: mod_base = OTHER; note = "2'-O-Methyl nucleoside"
  modified_base 23..24: mod_base = OTHER; note = "2'-O-Methyl nucleoside"
  modified_base 26: mod_base = OTHER; note = "2'-O-Methyl nucleoside"
  modified_base 2: mod_base = OTHER; note = "phosphorothioate linked nucleoside"
  source 1..26: mol_type = other RNA
tgataaaacgccgcagacacatctat

SEQ ID NO: 268 - RNA, 26 nt, synthetic construct
  misc_feature 1..26: note = HBV RNAi trigger antisense strand
  modified_base 25: mod_base = OTHER; note = "2'-hydroxy nucleoside"
  modified_base 2: mod_base = OTHER; note = "2'-deoxy-3'-fluoro nucleoside"
  modified_base 4: mod_base = OTHER; note = "2'-deoxy-3'-fluoro nucleoside"
  modified_base 6: mod_base = OTHER; note = "2'-deoxy-3'-fluoro nucleoside"
  modified_base 8: mod_base = OTHER; note = "2'-deoxy-3'-fluoro nucleoside"
  modified_base 10: mod_base = OTHER; note = "2'-deoxy-3'-fluoro nucleoside"
  modified_base 13..14: mod_base = OTHER; note = "2'-deoxy-3'-fluoro nucleoside"
  modified_base 16: mod_base = OTHER; note = "2'-deoxy-3'-fluoro nucleoside"
  modified_base 18: mod_base = OTHER; note = "2'-deoxy-3'-fluoro nucleoside"
  modified_base 20: mod_base = OTHER; note = "2'-deoxy-3'-fluoro nucleoside"
  modified_base 22: mod_base = OTHER; note = "2'-deoxy-3'-fluoro nucleoside"
  modified_base 1: mod_base = OTHER; note = "2'-O-Methyl nucleoside"
  modified_base 3: mod_base = OTHER; note = "2'-O-Methyl nucleoside"
  modified_base 5: mod_base = OTHER; note = "2'-O-Methyl nucleoside"
  modified_base 7: mod_base = OTHER; note = "2'-O-Methyl nucleoside"
  modified_base 9: mod_base = OTHER; note = "2'-O-Methyl nucleoside"
  modified_base 11..12: mod_base = OTHER; note = "2'-O-Methyl nucleoside"
  modified_base 15: mod_base = OTHER; note = "2'-O-Methyl nucleoside"
  modified_base 17: mod_base = OTHER; note = "2'-O-Methyl nucleoside"
  modified_base 19: mod_base = OTHER; note = "2'-O-Methyl nucleoside"
  modified_base 21: mod_base = OTHER; note = "2'-O-Methyl nucleoside"
  modified_base 23..24: mod_base = OTHER; note = "2'-O-Methyl nucleoside"
  modified_base 26: mod_base = OTHER; note = "2'-O-Methyl nucleoside"
  modified_base 2: mod_base = OTHER; note = "phosphorothioate linked nucleoside"
  source 1..26: mol_type = other RNA
tgaacaaatggcactagtaaacttat

SEQ ID NO: 269 - RNA, 26 nt, synthetic construct
  misc_feature 1..26: note = HBV RNAi trigger antisense strand
  modified_base 25: mod_base = OTHER; note = "2'-hydroxy nucleoside"
  modified_base 2: mod_base = OTHER; note = "2'-deoxy-3'-fluoro nucleoside"
  modified_base 4: mod_base = OTHER; note = "2'-deoxy-3'-fluoro nucleoside"
  modified_base 6: mod_base = OTHER; note = "2'-deoxy-3'-fluoro nucleoside"
  modified_base 8: mod_base = OTHER; note = "2'-deoxy-3'-fluoro nucleoside"
  modified_base 10: mod_base = OTHER; note = "2'-deoxy-3'-fluoro nucleoside"
  modified_base 13..14: mod_base = OTHER; note = "2'-deoxy-3'-fluoro nucleoside"
  modified_base 16: mod_base = OTHER; note = "2'-deoxy-3'-fluoro nucleoside"
  modified_base 18: mod_base = OTHER; note = "2'-deoxy-3'-fluoro nucleoside"
  modified_base 20: mod_base = OTHER; note = "2'-deoxy-3'-fluoro nucleoside"
  modified_base 22: mod_base = OTHER; note = "2'-deoxy-3'-fluoro nucleoside"
  modified_base 1: mod_base = OTHER; note = "2'-O-Methyl nucleoside"
  modified_base 3: mod_base = OTHER; note = "2'-O-Methyl nucleoside"
  modified_base 5: mod_base = OTHER; note = "2'-O-Methyl nucleoside"
  modified_base 7: mod_base = OTHER; note = "2'-O-Methyl nucleoside"
  modified_base 9: mod_base = OTHER; note = "2'-O-Methyl nucleoside"
  modified_base 11..12: mod_base = OTHER; note = "2'-O-Methyl nucleoside"
  modified_base 15: mod_base = OTHER; note = "2'-O-Methyl nucleoside"
  modified_base 17: mod_base = OTHER; note = "2'-O-Methyl nucleoside"
  modified_base 19: mod_base = OTHER; note = "2'-O-Methyl nucleoside"
  modified_base 21: mod_base = OTHER; note = "2'-O-Methyl nucleoside"
  modified_base 23..24: mod_base = OTHER; note = "2'-O-Methyl nucleoside"
  modified_base 26: mod_base = OTHER; note = "2'-O-Methyl nucleoside"
  modified_base 2: mod_base = OTHER; note = "phosphorothioate linked nucleoside"
  source 1..26: mol_type = other RNA
tgcgtcagcaaacacttggcacatat

SEQ ID NO: 270 - RNA, 26 nt, synthetic construct
  misc_feature 1..26: note = HBV RNAi trigger antisense strand
  modified_base 25: mod_base = OTHER; note = "2'-hydroxy nucleoside"
  modified_base 2: mod_base = OTHER; note = "2'-deoxy-3'-fluoro nucleoside"
  modified_base 4: mod_base = OTHER; note = "2'-deoxy-3'-fluoro nucleoside"
  modified_base 6: mod_base = OTHER; note = "2'-deoxy-3'-fluoro nucleoside"
  modified_base 8: mod_base = OTHER; note = "2'-deoxy-3'-fluoro nucleoside"
  modified_base 10: mod_base = OTHER; note = "2'-deoxy-3'-fluoro nucleoside"
  modified_base 13..14: mod_base = OTHER; note = "2'-deoxy-3'-fluoro nucleoside"
  modified_base 16: mod_base = OTHER; note = "2'-deoxy-3'-fluoro nucleoside"
  modified_base 18: mod_base = OTHER; note = "2'-deoxy-3'-fluoro nucleoside"
  modified_base 20: mod_base = OTHER; note = "2'-deoxy-3'-fluoro nucleoside"
  modified_base 22: mod_base = OTHER; note = "2'-deoxy-3'-fluoro nucleoside"
  modified_base 1: mod_base = OTHER; note = "2'-O-Methyl nucleoside"
  modified_base 3: mod_base = OTHER; note = "2'-O-Methyl nucleoside"
  modified_base 5: mod_base = OTHER; note = "2'-O-Methyl nucleoside"
  modified_base 7: mod_base = OTHER; note = "2'-O-Methyl nucleoside"
  modified_base 9: mod_base = OTHER; note = "2'-O-Methyl nucleoside"
  modified_base 11..12: mod_base = OTHER; note = "2'-O-Methyl nucleoside"
  modified_base 15: mod_base = OTHER; note = "2'-O-Methyl nucleoside"
  modified_base 17: mod_base = OTHER; note = "2'-O-Methyl nucleoside"
  modified_base 19: mod_base = OTHER; note = "2'-O-Methyl nucleoside"
  modified_base 21: mod_base = OTHER; note = "2'-O-Methyl nucleoside"
  modified_base 23..24: mod_base = OTHER; note = "2'-O-Methyl nucleoside"
  modified_base 26: mod_base = OTHER; note = "2'-O-Methyl nucleoside"
  modified_base 2: mod_base = OTHER; note = "phosphorothioate linked nucleoside"
  source 1..26: mol_type = other RNA
tgaaccactgaacaaatggcacttat

SEQ ID NO: 271 - RNA, 26 nt, synthetic construct
  misc_feature 1..26: note = HBV RNAi trigger antisense strand
  modified_base 25: mod_base = OTHER; note = "2'-hydroxy nucleoside"
  modified_base 2: mod_base = OTHER; note = "2'-deoxy-3'-fluoro nucleoside"
  modified_base 4: mod_base = OTHER; note = "2'-deoxy-3'-fluoro nucleoside"
  modified_base 6: mod_base = OTHER; note = "2'-deoxy-3'-fluoro nucleoside"
  modified_base 8: mod_base = OTHER; note = "2'-deoxy-3'-fluoro nucleoside"
  modified_base 10: mod_base = OTHER; note = "2'-deoxy-3'-fluoro nucleoside"
  modified_base 13..14: mod_base = OTHER; note = "2'-deoxy-3'-fluoro nucleoside"
  modified_base 16: mod_base = OTHER; note = "2'-deoxy-3'-fluoro nucleoside"
  modified_base 18: mod_base = OTHER; note = "2'-deoxy-3'-fluoro nucleoside"
  modified_base 20: mod_base = OTHER; note = "2'-deoxy-3'-fluoro nucleoside"
  modified_base 22: mod_base = OTHER; note = "2'-deoxy-3'-fluoro nucleoside"
  modified_base 1: mod_base = OTHER; note = "2'-O-Methyl nucleoside"
  modified_base 3: mod_base = OTHER; note = "2'-O-Methyl nucleoside"
  modified_base 5: mod_base = OTHER; note = "2'-O-Methyl nucleoside"
  modified_base 7: mod_base = OTHER; note = "2'-O-Methyl nucleoside"
  modified_base 9: mod_base = OTHER; note = "2'-O-Methyl nucleoside"
  modified_base 11..12: mod_base = OTHER; note = "2'-O-Methyl nucleoside"
  modified_base 15: mod_base = OTHER; note = "2'-O-Methyl nucleoside"
  modified_base 17: mod_base = OTHER; note = "2'-O-Methyl nucleoside"
  modified_base 19: mod_base = OTHER; note = "2'-O-Methyl nucleoside"
  modified_base 21: mod_base = OTHER; note = "2'-O-Methyl nucleoside"
  modified_base 23..24: mod_base = OTHER; note = "2'-O-Methyl nucleoside"
  modified_base 26: mod_base = OTHER; note = "2'-O-Methyl nucleoside"
  modified_base 2: mod_base = OTHER; note = "phosphorothioate linked nucleoside"
  source 1..26: mol_type = other RNA
taacgggcaacataccttgataatat

SEQ ID NO: 272 - RNA, 26 nt, synthetic construct
  misc_feature 1..26: note = HBV RNAi trigger antisense strand
  modified_base 25: mod_base = OTHER; note = "2'-hydroxy nucleoside"
  modified_base 2: mod_base = OTHER; note = "2'-deoxy-3'-fluoro nucleoside"
  modified_base 4: mod_base = OTHER; note = "2'-deoxy-3'-fluoro nucleoside"
  modified_base 6: mod_base = OTHER; note = "2'-deoxy-3'-fluoro nucleoside"
  modified_base 8: mod_base = OTHER; note = "2'-deoxy-3'-fluoro nucleoside"
  modified_base 10: mod_base = OTHER; note = "2'-deoxy-3'-fluoro nucleoside"
  modified_base 13..14: mod_base = OTHER; note = "2'-deoxy-3'-fluoro nucleoside"
  modified_base 16: mod_base = OTHER; note = "2'-deoxy-3'-fluoro nucleoside"
  modified_base 18: mod_base = OTHER; note = "2'-deoxy-3'-fluoro nucleoside"
  modified_base 20: mod_base = OTHER; note = "2'-deoxy-3'-fluoro nucleoside"
  modified_base 22: mod_base = OTHER; note = "2'-deoxy-3'-fluoro nucleoside"
  modified_base 1: mod_base = OTHER; note = "2'-O-Methyl nucleoside"
  modified_base 3: mod_base = OTHER; note = "2'-O-Methyl nucleoside"
  modified_base 5: mod_base = OTHER; note = "2'-O-Methyl nucleoside"
  modified_base 7: mod_base = OTHER; note = "2'-O-Methyl nucleoside"
  modified_base 9: mod_base = OTHER; note = "2'-O-Methyl nucleoside"
  modified_base 11..12: mod_base = OTHER; note = "2'-O-Methyl nucleoside"
  modified_base 15: mod_base = OTHER; note = "2'-O-Methyl nucleoside"
  modified_base 17: mod_base = OTHER; note = "2'-O-Methyl nucleoside"
  modified_base 19: mod_base = OTHER; note = "2'-O-Methyl nucleoside"
  modified_base 21: mod_base = OTHER; note = "2'-O-Methyl nucleoside"
  modified_base 23..24: mod_base = OTHER; note = "2'-O-Methyl nucleoside"
  modified_base 26: mod_base = OTHER; note = "2'-O-Methyl nucleoside"
  modified_base 2: mod_base = OTHER; note = "phosphorothioate linked nucleoside"
  source 1..26: mol_type = other RNA
tactagtaaactgagccaggagatat

SEQ ID NO: 273 - RNA, 26 nt, synthetic construct
  misc_feature 1..26: note = HBV RNAi trigger antisense strand
  modified_base 25: mod_base = OTHER; note = "2'-hydroxy nucleoside"
  modified_base 2: mod_base = OTHER; note = "2'-deoxy-3'-fluoro nucleoside"
  modified_base 4: mod_base = OTHER; note = "2'-deoxy-3'-fluoro nucleoside"
  modified_base 6: mod_base = OTHER; note = "2'-deoxy-3'-fluoro nucleoside"
  modified_base 8: mod_base = OTHER; note = "2'-deoxy-3'-fluoro nucleoside"
  modified_base 10: mod_base = OTHER; note = "2'-deoxy-3'-fluoro nucleoside"
  modified_base 13..14: mod_base = OTHER; note = "2'-deoxy-3'-fluoro nucleoside"
  modified_base 16: mod_base = OTHER; note = "2'-deoxy-3'-fluoro nucleoside"
  modified_base 18: mod_base = OTHER; note = "2'-deoxy-3'-fluoro nucleoside"
  modified_base 20: mod_base = OTHER; note = "2'-deoxy-3'-fluoro nucleoside"
  modified_base 22: mod_base = OTHER; note = "2'-deoxy-3'-fluoro nucleoside"
  modified_base 1: mod_base = OTHER; note = "2'-O-Methyl nucleoside"
  modified_base 3: mod_base = OTHER; note = "2'-O-Methyl nucleoside"
  modified_base 5: mod_base = OTHER; note = "2'-O-Methyl nucleoside"
  modified_base 7: mod_base = OTHER; note = "2'-O-Methyl nucleoside"
  modified_base 9: mod_base = OTHER; note = "2'-O-Methyl nucleoside"
  modified_base 11..12: mod_base = OTHER; note = "2'-O-Methyl nucleoside"
  modified_base 15: mod_base = OTHER; note = "2'-O-Methyl nucleoside"
  modified_base 17: mod_base = OTHER; note = "2'-O-Methyl nucleoside"
  modified_base 19: mod_base = OTHER; note = "2'-O-Methyl nucleoside"
  modified_base 21: mod_base = OTHER; note = "2'-O-Methyl nucleoside"
  modified_base 23..24: mod_base = OTHER; note = "2'-O-Methyl nucleoside"
  modified_base 26: mod_base = OTHER; note = "2'-O-Methyl nucleoside"
  modified_base 2: mod_base = OTHER; note = "phosphorothioate linked nucleoside"
  source 1..26: mol_type = other RNA
tggacaaacgggcaacatacctttat

SEQ ID NO: 274 - RNA, 26 nt, synthetic construct
  misc_feature 1..26: note = HBV RNAi trigger antisense strand
  modified_base 25: mod_base = OTHER; note = "2'-hydroxy nucleoside"
  modified_base 2: mod_base = OTHER; note = "2'-deoxy-3'-fluoro nucleoside"
  modified_base 4: mod_base = OTHER; note = "2'-deoxy-3'-fluoro nucleoside"
  modified_base 6: mod_base = OTHER; note = "2'-deoxy-3'-fluoro nucleoside"
  modified_base 8: mod_base = OTHER; note = "2'-deoxy-3'-fluoro nucleoside"
  modified_base 10: mod_base = OTHER; note = "2'-deoxy-3'-fluoro nucleoside"
  modified_base 13..14: mod_base = OTHER; note = "2'-deoxy-3'-fluoro nucleoside"
  modified_base 16: mod_base = OTHER; note = "2'-deoxy-3'-fluoro nucleoside"
  modified_base 18: mod_base = OTHER; note = "2'-deoxy-3'-fluoro nucleoside"
  modified_base 20: mod_base = OTHER; note = "2'-deoxy-3'-fluoro nucleoside"
  modified_base 22: mod_base = OTHER; note = "2'-deoxy-3'-fluoro nucleoside"
  modified_base 1: mod_base = OTHER; note = "2'-O-Methyl nucleoside"
  modified_base 3: mod_base = OTHER; note = "2'-O-Methyl nucleoside"
  modified_base 5: mod_base = OTHER; note = "2'-O-Methyl nucleoside"
  modified_base 7: mod_base = OTHER; note = "2'-O-Methyl nucleoside"
  modified_base 9: mod_base = OTHER; note = "2'-O-Methyl nucleoside"
  modified_base 11..12: mod_base = OTHER; note = "2'-O-Methyl nucleoside"
  modified_base 15: mod_base = OTHER; note = "2'-O-Methyl nucleoside"
  modified_base 17: mod_base = OTHER; note = "2'-O-Methyl nucleoside"
  modified_base 19: mod_base = OTHER; note = "2'-O-Methyl nucleoside"
  modified_base 21: mod_base = OTHER; note = "2'-O-Methyl nucleoside"
  modified_base 23..24: mod_base = OTHER; note = "2'-O-Methyl nucleoside"
  modified_base 26: mod_base = OTHER; note = "2'-O-Methyl nucleoside"
  modified_base 2: mod_base = OTHER; note = "phosphorothioate linked nucleoside"
  source 1..26: mol_type = other RNA
tacgggcaacataccttgataattat

SEQ ID NO: 275 - RNA, 26 nt, synthetic construct
  misc_feature 1..26: note = HBV RNAi trigger antisense strand
  modified_base 25: mod_base = OTHER; note = "2'-hydroxy nucleoside"
  modified_base 2: mod_base = OTHER; note = "2'-deoxy-3'-fluoro nucleoside"
  modified_base 4: mod_base = OTHER; note = "2'-deoxy-3'-fluoro nucleoside"
  modified_base 6: mod_base = OTHER; note = "2'-deoxy-3'-fluoro nucleoside"
  modified_base 8: mod_base = OTHER; note = "2'-deoxy-3'-fluoro nucleoside"
  modified_base 10: mod_base = OTHER; note = "2'-deoxy-3'-fluoro nucleoside"
  modified_base 13..14: mod_base = OTHER; note = "2'-deoxy-3'-fluoro nucleoside"
  modified_base 16: mod_base = OTHER; note = "2'-deoxy-3'-fluoro nucleoside"
  modified_base 18: mod_base = OTHER; note = "2'-deoxy-3'-fluoro nucleoside"
  modified_base 20: mod_base = OTHER; note = "2'-deoxy-3'-fluoro nucleoside"
  modified_base 22: mod_base = OTHER; note = "2'-deoxy-3'-fluoro nucleoside"
  modified_base 1: mod_base = OTHER; note = "2'-O-Methyl nucleoside"
  modified_base 3: mod_base = OTHER; note = "2'-O-Methyl nucleoside"
  modified_base 5: mod_base = OTHER; note = "2'-O-Methyl nucleoside"
  modified_base 7: mod_base = OTHER; note = "2'-O-Methyl nucleoside"
  modified_base 9: mod_base = OTHER; note = "2'-O-Methyl nucleoside"
  modified_base 11..12: mod_base = OTHER; note = "2'-O-Methyl nucleoside"
  modified_base 15: mod_base = OTHER; note = "2'-O-Methyl nucleoside"
  modified_base 17: mod_base = OTHER; note = "2'-O-Methyl nucleoside"
  modified_base 19: mod_base = OTHER; note = "2'-O-Methyl nucleoside"
  modified_base 21: mod_base = OTHER; note = "2'-O-Methyl nucleoside"
  modified_base 23..24: mod_base = OTHER; note = "2'-O-Methyl nucleoside"
  modified_base 26: mod_base = OTHER; note = "2'-O-Methyl nucleoside"
  modified_base 2: mod_base = OTHER; note = "phosphorothioate linked nucleoside"
  source 1..26: mol_type = other RNA
tgaagcgaagtgcacacggaccgtat

SEQ ID NO: 276 - RNA, 26 nt, synthetic construct
  misc_feature 1..26: note = HBV RNAi trigger antisense strand
  modified_base 25: mod_base = OTHER; note = "2'-hydroxy nucleoside"
  modified_base 2: mod_base = OTHER; note = "2'-deoxy-3'-fluoro nucleoside"
  modified_base 4: mod_base = OTHER; note = "2'-deoxy-3'-fluoro nucleoside"
  modified_base 6: mod_base = OTHER; note = "2'-deoxy-3'-fluoro nucleoside"
  modified_base 8: mod_base = OTHER; note = "2'-deoxy-3'-fluoro nucleoside"
  modified_base 10: mod_base = OTHER; note = "2'-deoxy-3'-fluoro nucleoside"
  modified_base 12: mod_base = OTHER; note = "2'-deoxy-3'-fluoro nucleoside"
  modified_base 14..15: mod_base = OTHER; note = "2'-deoxy-3'-fluoro nucleoside"
  modified_base 18: mod_base = OTHER; note = "2'-deoxy-3'-fluoro nucleoside"
  modified_base 20: mod_base = OTHER; note = "2'-deoxy-3'-fluoro nucleoside"
  modified_base 22: mod_base = OTHER; note = "2'-deoxy-3'-fluoro nucleoside"
  modified_base 1: mod_base = OTHER; note = "2'-O-Methyl nucleoside"
  modified_base 3: mod_base = OTHER; note = "2'-O-Methyl nucleoside"
  modified_base 5: mod_base = OTHER; note = "2'-O-Methyl nucleoside"
  modified_base 7: mod_base = OTHER; note = "2'-O-Methyl nucleoside"
  modified_base 9: mod_base = OTHER; note = "2'-O-Methyl nucleoside"
  modified_base 11: mod_base = OTHER; note = "2'-O-Methyl nucleoside"
  modified_base 13: mod_base = OTHER; note = "2'-O-Methyl nucleoside"
  modified_base 16..17: mod_base = OTHER; note = "2'-O-Methyl nucleoside"
  modified_base 19: mod_base = OTHER; note = "2'-O-Methyl nucleoside"
  modified_base 21: mod_base = OTHER; note = "2'-O-Methyl nucleoside"
  modified_base 23..24: mod_base = OTHER; note = "2'-O-Methyl nucleoside"
  modified_base 26: mod_base = OTHER; note = "2'-O-Methyl nucleoside"
  modified_base 2: mod_base = OTHER; note = "phosphorothioate linked nucleoside"
  source 1..26: mol_type = other RNA
tgataaaacgccgcagacacatctat

SEQ ID NO: 277 - RNA, 26 nt, synthetic construct
  misc_feature 1..26: note = HBV RNAi trigger antisense strand
  modified_base 25: mod_base = OTHER; note = "2'-hydroxy nucleoside"
  modified_base 2: mod_base = OTHER; note = "2'-deoxy-3'-fluoro nucleoside"
  modified_base 4: mod_base = OTHER; note = "2'-deoxy-3'-fluoro nucleoside"
  modified_base 6: mod_base = OTHER; note = "2'-deoxy-3'-fluoro nucleoside"
  modified_base 8: mod_base = OTHER; note = "2'-deoxy-3'-fluoro nucleoside"
  modified_base 10: mod_base = OTHER; note = "2'-deoxy-3'-fluoro nucleoside"
  modified_base 12: mod_base = OTHER; note = "2'-deoxy-3'-fluoro nucleoside"
  modified_base 14..15: mod_base = OTHER; note = "2'-deoxy-3'-fluoro nucleoside"
  modified_base 18: mod_base = OTHER; note = "2'-deoxy-3'-fluoro nucleoside"
  modified_base 20: mod_base = OTHER; note = "2'-deoxy-3'-fluoro nucleoside"
  modified_base 22: mod_base = OTHER; note = "2'-deoxy-3'-fluoro nucleoside"
  modified_base 1: mod_base = OTHER; note = "2'-O-Methyl nucleoside"
  modified_base 3: mod_base = OTHER; note = "2'-O-Methyl nucleoside"
  modified_base 5: mod_base = OTHER; note = "2'-O-Methyl nucleoside"
  modified_base 7: mod_base = OTHER; note = "2'-O-Methyl nucleoside"
  modified_base 9: mod_base = OTHER; note = "2'-O-Methyl nucleoside"
  modified_base 11: mod_base = OTHER; note = "2'-O-Methyl nucleoside"
  modified_base 13: mod_base = OTHER; note = "2'-O-Methyl nucleoside"
  modified_base 16..17: mod_base = OTHER; note = "2'-O-Methyl nucleoside"
  modified_base 19: mod_base = OTHER; note = "2'-O-Methyl nucleoside"
  modified_base 21: mod_base = OTHER; note = "2'-O-Methyl nucleoside"
  modified_base 23..24: mod_base = OTHER; note = "2'-O-Methyl nucleoside"
  modified_base 26: mod_base = OTHER; note = "2'-O-Methyl nucleoside"
  modified_base 2: mod_base = OTHER; note = "phosphorothioate linked nucleoside"
  source 1..26: mol_type = other RNA
tgaacaaatggcactagtaaacttat

SEQ ID NO: 278 - RNA, 26 nt, synthetic construct
  misc_feature 1..26: note = HBV RNAi trigger antisense strand
  modified_base 25: mod_base = OTHER; note = "2'-hydroxy nucleoside"
  modified_base 2: mod_base = OTHER; note = "2'-deoxy-3'-fluoro nucleoside"
  modified_base 4: mod_base = OTHER; note = "2'-deoxy-3'-fluoro nucleoside"
  modified_base 6: mod_base = OTHER; note = "2'-deoxy-3'-fluoro nucleoside"
  modified_base 8: mod_base = OTHER; note = "2'-deoxy-3'-fluoro nucleoside"
  modified_base 10: mod_base = OTHER; note = "2'-deoxy-3'-fluoro nucleoside"
  modified_base 12: mod_base = OTHER; note = "2'-deoxy-3'-fluoro nucleoside"
  modified_base 14..15: mod_base = OTHER; note = "2'-deoxy-3'-fluoro nucleoside"
  modified_base 18: mod_base = OTHER; note = "2'-deoxy-3'-fluoro nucleoside"
  modified_base 20: mod_base = OTHER; note = "2'-deoxy-3'-fluoro nucleoside"
  modified_base 22: mod_base = OTHER; note = "2'-deoxy-3'-fluoro nucleoside"
  modified_base 1: mod_base = OTHER; note = "2'-O-Methyl nucleoside"
  modified_base 3: mod_base = OTHER; note = "2'-O-Methyl nucleoside"
  modified_base 5: mod_base = OTHER; note = "2'-O-Methyl nucleoside"
  modified_base 7: mod_base = OTHER; note = "2'-O-Methyl nucleoside"
  modified_base 9: mod_base = OTHER; note = "2'-O-Methyl nucleoside"
  modified_base 11: mod_base = OTHER; note = "2'-O-Methyl nucleoside"
  modified_base 13: mod_base = OTHER; note = "2'-O-Methyl nucleoside"
  modified_base 16..17: mod_base = OTHER; note = "2'-O-Methyl nucleoside"
  modified_base 19: mod_base = OTHER; note = "2'-O-Methyl nucleoside"
  modified_base 21: mod_base = OTHER; note = "2'-O-Methyl nucleoside"
  modified_base 23..24: mod_base = OTHER; note = "2'-O-Methyl nucleoside"
  modified_base 26: mod_base = OTHER; note = "2'-O-Methyl nucleoside"
  modified_base 2: mod_base = OTHER; note = "phosphorothioate linked nucleoside"
  source 1..26: mol_type = other RNA
tgcgtcagcaaacacttggcacatat

SEQ ID NO: 279 - RNA, 26 nt, synthetic construct
  misc_feature 1..26: note = HBV RNAi trigger antisense strand
  modified_base 25: mod_base = OTHER; note = "2'-hydroxy nucleoside"
  modified_base 2: mod_base = OTHER; note = "2'-deoxy-3'-fluoro nucleoside"
  modified_base 4: mod_base = OTHER; note = "2'-deoxy-3'-fluoro nucleoside"
  modified_base 6: mod_base = OTHER; note = "2'-deoxy-3'-fluoro nucleoside"
  modified_base 8: mod_base = OTHER; note = "2'-deoxy-3'-fluoro nucleoside"
  modified_base 10: mod_base = OTHER; note = "2'-deoxy-3'-fluoro nucleoside"
  modified_base 12: mod_base = OTHER; note = "2'-deoxy-3'-fluoro nucleoside"
  modified_base 14..15: mod_base = OTHER; note = "2'-deoxy-3'-fluoro nucleoside"
  modified_base 18: mod_base = OTHER; note = "2'-deoxy-3'-fluoro nucleoside"
  modified_base 20: mod_base = OTHER; note = "2'-deoxy-3'-fluoro nucleoside"
  modified_base 22: mod_base = OTHER; note = "2'-deoxy-3'-fluoro nucleoside"
  modified_base 1: mod_base = OTHER; note = "2'-O-Methyl nucleoside"
  modified_base 3: mod_base = OTHER; note = "2'-O-Methyl nucleoside"
  modified_base 5: mod_base = OTHER; note = "2'-O-Methyl nucleoside"
  modified_base 7: mod_base = OTHER; note = "2'-O-Methyl nucleoside"
  modified_base 9: mod_base = OTHER; note = "2'-O-Methyl nucleoside"
  modified_base 11: mod_base = OTHER; note = "2'-O-Methyl nucleoside"
  modified_base 13: mod_base = OTHER; note = "2'-O-Methyl nucleoside"
  modified_base 16..17: mod_base = OTHER; note = "2'-O-Methyl nucleoside"
  modified_base 19: mod_base = OTHER; note = "2'-O-Methyl nucleoside"
  modified_base 21: mod_base = OTHER; note = "2'-O-Methyl nucleoside"
  modified_base 23..24: mod_base = OTHER; note = "2'-O-Methyl nucleoside"
  modified_base 26: mod_base = OTHER; note = "2'-O-Methyl nucleoside"
  modified_base 2: mod_base = OTHER; note = "phosphorothioate linked nucleoside"
  source 1..26: mol_type = other RNA
tgaaccactgaacaaatggcacttat

SEQ ID NO: 280 - RNA, 26 nt, synthetic construct
  misc_feature 1..26: note = HBV RNAi trigger antisense strand
  modified_base 25: mod_base = OTHER; note = "2'-hydroxy nucleoside"
  modified_base 2: mod_base = OTHER; note = "2'-deoxy-3'-fluoro nucleoside"
  modified_base 4: mod_base = OTHER; note = "2'-deoxy-3'-fluoro nucleoside"
  modified_base 6: mod_base = OTHER; note = "2'-deoxy-3'-fluoro nucleoside"
  modified_base 8: mod_base = OTHER; note = "2'-deoxy-3'-fluoro nucleoside"
  modified_base 10: mod_base = OTHER; note = "2'-deoxy-3'-fluoro nucleoside"
  modified_base 12: mod_base = OTHER; note = "2'-deoxy-3'-fluoro nucleoside"
  modified_base 14..15: mod_base = OTHER; note = "2'-deoxy-3'-fluoro nucleoside"
  modified_base 18: mod_base = OTHER; note = "2'-deoxy-3'-fluoro nucleoside"
  modified_base 20: mod_base = OTHER; note = "2'-deoxy-3'-fluoro nucleoside"
  modified_base 22: mod_base = OTHER; note = "2'-deoxy-3'-fluoro nucleoside"
  modified_base 1: mod_base = OTHER; note = "2'-O-Methyl nucleoside"
  modified_base 3: mod_base = OTHER; note = "2'-O-Methyl nucleoside"
  modified_base 5: mod_base = OTHER; note = "2'-O-Methyl nucleoside"
  modified_base 7: mod_base = OTHER; note = "2'-O-Methyl nucleoside"
  modified_base 9: mod_base = OTHER; note = "2'-O-Methyl nucleoside"
  modified_base 11: mod_base = OTHER; note = "2'-O-Methyl nucleoside"
  modified_base 13: mod_base = OTHER; note = "2'-O-Methyl nucleoside"
  modified_base 16..17: mod_base = OTHER; note = "2'-O-Methyl nucleoside"
  modified_base 19: mod_base = OTHER; note = "2'-O-Methyl nucleoside"
  modified_base 21: mod_base = OTHER; note = "2'-O-Methyl nucleoside"
  modified_base 23..24: mod_base = OTHER; note = "2'-O-Methyl nucleoside"
  modified_base 26: mod_base = OTHER; note = "2'-O-Methyl nucleoside"
  modified_base 2: mod_base = OTHER; note = "phosphorothioate linked nucleoside"
  source 1..26: mol_type = other RNA
taacgggcaacataccttgataatat

SEQ ID NO: 281 - RNA, 26 nt, synthetic construct
  misc_feature 1..26: note = HBV RNAi trigger antisense strand
  modified_base 25: mod_base = OTHER; note = "2'-hydroxy nucleoside"
  modified_base 2: mod_base = OTHER; note = "2'-deoxy-3'-fluoro nucleoside"
  modified_base 4: mod_base = OTHER; note = "2'-deoxy-3'-fluoro nucleoside"
  modified_base 6: mod_base = OTHER; note = "2'-deoxy-3'-fluoro nucleoside"
  modified_base 8: mod_base = OTHER; note = "2'-deoxy-3'-fluoro nucleoside"
  modified_base 10: mod_base = OTHER; note = "2'-deoxy-3'-fluoro nucleoside"
  modified_base 12: mod_base = OTHER; note = "2'-deoxy-3'-fluoro nucleoside"
  modified_base 14..15: mod_base = OTHER; note = "2'-deoxy-3'-fluoro nucleoside"
  modified_base 18: mod_base = OTHER; note = "2'-deoxy-3'-fluoro nucleoside"
  modified_base 20: mod_base = OTHER; note = "2'-deoxy-3'-fluoro nucleoside"
  modified_base 22: mod_base = OTHER; note = "2'-deoxy-3'-fluoro nucleoside"
  modified_base 1: mod_base = OTHER; note = "2'-O-Methyl nucleoside"
  modified_base 3: mod_base = OTHER; note = "2'-O-Methyl nucleoside"
  modified_base 5: mod_base = OTHER; note = "2'-O-Methyl nucleoside"
  modified_base 7: mod_base = OTHER; note = "2'-O-Methyl nucleoside"
  modified_base 9: mod_base = OTHER; note = "2'-O-Methyl nucleoside"
  modified_base 11: mod_base = OTHER; note = "2'-O-Methyl nucleoside"
  modified_base 13: mod_base = OTHER; note = "2'-O-Methyl nucleoside"
  modified_base 16..17: mod_base = OTHER; note = "2'-O-Methyl nucleoside"
  modified_base 19: mod_base = OTHER; note = "2'-O-Methyl nucleoside"
  modified_base 21: mod_base = OTHER; note = "2'-O-Methyl nucleoside"
  modified_base 23..24: mod_base = OTHER; note = "2'-O-Methyl nucleoside"
  modified_base 26: mod_base = OTHER; note = "2'-O-Methyl nucleoside"
  modified_base 2: mod_base = OTHER; note = "phosphorothioate linked nucleoside"
  source 1..26: mol_type = other RNA
tactagtaaactgagccaggagatat

SEQ ID NO: 282 - RNA, 26 nt, synthetic construct
  misc_feature 1..26: note = HBV RNAi trigger antisense strand
  modified_base 25: mod_base = OTHER; note = "2'-hydroxy nucleoside"
  modified_base 2: mod_base = OTHER; note = "2'-deoxy-3'-fluoro nucleoside"
  modified_base 4: mod_base = OTHER; note = "2'-deoxy-3'-fluoro nucleoside"
  modified_base 6: mod_base = OTHER; note = "2'-deoxy-3'-fluoro nucleoside"
  modified_base 8: mod_base = OTHER; note = "2'-deoxy-3'-fluoro nucleoside"
  modified_base 10: mod_base = OTHER; note = "2'-deoxy-3'-fluoro nucleoside"
  modified_base 12: mod_base = OTHER; note = "2'-deoxy-3'-fluoro nucleoside"
  modified_base 14..15: mod_base = OTHER; note = "2'-deoxy-3'-fluoro nucleoside"
  modified_base 18: mod_base = OTHER; note = "2'-deoxy-3'-fluoro nucleoside"
  modified_base 20: mod_base = OTHER; note = "2'-deoxy-3'-fluoro nucleoside"
  modified_base 22: mod_base = OTHER; note = "2'-deoxy-3'-fluoro nucleoside"
  modified_base 1: mod_base = OTHER; note = "2'-O-Methyl nucleoside"
  modified_base 3: mod_base = OTHER; note = "2'-O-Methyl nucleoside"
  modified_base 5: mod_base = OTHER; note = "2'-O-Methyl nucleoside"
  modified_base 7: mod_base = OTHER; note = "2'-O-Methyl nucleoside"
  modified_base 9: mod_base = OTHER; note = "2'-O-Methyl nucleoside"
  modified_base 11: mod_base = OTHER; note = "2'-O-Methyl nucleoside"
  modified_base 13: mod_base = OTHER; note = "2'-O-Methyl nucleoside"
  modified_base 16..17: mod_base = OTHER; note = "2'-O-Methyl nucleoside"
  modified_base 19: mod_base = OTHER; note = "2'-O-Methyl nucleoside"
  modified_base 21: mod_base = OTHER; note = "2'-O-Methyl nucleoside"
  modified_base 23..24: mod_base = OTHER; note = "2'-O-Methyl nucleoside"
  modified_base 26: mod_base = OTHER; note = "2'-O-Methyl nucleoside"
  modified_base 2: mod_base = OTHER; note = "phosphorothioate linked nucleoside"
  source 1..26: mol_type = other RNA
tggacaaacgggcaacatacctttat

SEQ ID NO: 283 - RNA, 26 nt, synthetic construct
  misc_feature 1..26: note = HBV RNAi trigger antisense strand
  modified_base 25: mod_base = OTHER; note = "2'-hydroxy nucleoside"
  modified_base 2: mod_base = OTHER; note = "2'-deoxy-3'-fluoro nucleoside"
  modified_base 4: mod_base = OTHER; note = "2'-deoxy-3'-fluoro nucleoside"
  modified_base 6: mod_base = OTHER; note = "2'-deoxy-3'-fluoro nucleoside"
  modified_base 8: mod_base = OTHER; note = "2'-deoxy-3'-fluoro nucleoside"
  modified_base 10: mod_base = OTHER; note = "2'-deoxy-3'-fluoro nucleoside"
  modified_base 12: mod_base = OTHER; note = "2'-deoxy-3'-fluoro nucleoside"
  modified_base 14..15: mod_base = OTHER; note = "2'-deoxy-3'-fluoro nucleoside"
  modified_base 18: mod_base = OTHER; note = "2'-deoxy-3'-fluoro nucleoside"
  modified_base 20: mod_base = OTHER; note = "2'-deoxy-3'-fluoro nucleoside"
  modified_base 22: mod_base = OTHER; note = "2'-deoxy-3'-fluoro nucleoside"
  modified_base 1: mod_base = OTHER; note = "2'-O-Methyl nucleoside"
  modified_base 3: mod_base = OTHER; note = "2'-O-Methyl nucleoside"
  modified_base 5: mod_base = OTHER; note = "2'-O-Methyl nucleoside"
  modified_base 7: mod_base = OTHER; note = "2'-O-Methyl nucleoside"
  modified_base 9: mod_base = OTHER; note = "2'-O-Methyl nucleoside"
  modified_base 11: mod_base = OTHER; note = "2'-O-Methyl nucleoside"
  modified_base 13: mod_base = OTHER; note = "2'-O-Methyl nucleoside"
  modified_base 16..17: mod_base = OTHER; note = "2'-O-Methyl nucleoside"
  modified_base 19: mod_base = OTHER; note = "2'-O-Methyl nucleoside"
  modified_base 21: mod_base = OTHER; note = "2'-O-Methyl nucleoside"
  modified_base 23..24: mod_base = OTHER; note = "2'-O-Methyl nucleoside"
  modified_base 26: mod_base = OTHER; note = "2'-O-Methyl nucleoside"
  modified_base 2: mod_base = OTHER; note = "phosphorothioate linked nucleoside"
  source 1..26: mol_type = other RNA
tacgggcaacataccttgataattat

SEQ ID NO: 284 - RNA, 26 nt, synthetic construct
  misc_feature 1..26: note = HBV RNAi trigger antisense strand
  modified_base 25: mod_base = OTHER; note = "2'-hydroxy nucleoside"
  modified_base 2: mod_base = OTHER; note = "2'-deoxy-3'-fluoro nucleoside"
  modified_base 4: mod_base = OTHER; note = "2'-deoxy-3'-fluoro nucleoside"
  modified_base 6: mod_base = OTHER; note = "2'-deoxy-3'-fluoro nucleoside"
  modified_base 8: mod_base = OTHER; note = "2'-deoxy-3'-fluoro nucleoside"
  modified_base 10: mod_base = OTHER; note = "2'-deoxy-3'-fluoro nucleoside"
  modified_base 12: mod_base = OTHER; note = "2'-deoxy-3'-fluoro nucleoside"
  modified_base 14..15: mod_base = OTHER; note = "2'-deoxy-3'-fluoro nucleoside"
  modified_base 18: mod_base = OTHER; note = "2'-deoxy-3'-fluoro nucleoside"
  modified_base 20: mod_base = OTHER; note = "2'-deoxy-3'-fluoro nucleoside"
  modified_base 22: mod_base = OTHER; note = "2'-deoxy-3'-fluoro nucleoside"
  modified_base 1: mod_base = OTHER; note = "2'-O-Methyl nucleoside"
  modified_base 3: mod_base = OTHER; note = "2'-O-Methyl nucleoside"
  modified_base 5: mod_base = OTHER; note = "2'-O-Methyl nucleoside"
  modified_base 7: mod_base = OTHER; note = "2'-O-Methyl nucleoside"
  modified_base 9: mod_base = OTHER; note = "2'-O-Methyl nucleoside"
  modified_base 11: mod_base = OTHER; note = "2'-O-Methyl nucleoside"
  modified_base 13: mod_base = OTHER; note = "2'-O-Methyl nucleoside"
  modified_base 16..17: mod_base = OTHER; note = "2'-O-Methyl nucleoside"
  modified_base 19: mod_base = OTHER; note = "2'-O-Methyl nucleoside"
  modified_base 21: mod_base = OTHER; note = "2'-O-Methyl nucleoside"
  modified_base 23..24: mod_base = OTHER; note = "2'-O-Methyl nucleoside"
  modified_base 26: mod_base = OTHER; note = "2'-O-Methyl nucleoside"
  modified_base 2: mod_base = OTHER; note = "phosphorothioate linked nucleoside"
  source 1..26: mol_type = other RNA
tgaagcgaagtgcacacggaccgtat

SEQ ID NO: 285 - RNA, 26 nt, synthetic construct
  misc_feature 1..26: note = HBV RNAi trigger antisense strand
  modified_base 25: mod_base = OTHER; note = "2'-hydroxy nucleoside"
  modified_base 2: mod_base = OTHER; note = "2'-deoxy-3'-fluoro nucleoside"
  modified_base 4: mod_base = OTHER; note = "2'-deoxy-3'-fluoro nucleoside"
  modified_base 6: mod_base = OTHER; note = "2'-deoxy-3'-fluoro nucleoside"
  modified_base 8: mod_base = OTHER; note = "2'-deoxy-3'-fluoro nucleoside"
  modified_base 10: mod_base = OTHER; note = "2'-deoxy-3'-fluoro nucleoside"
  modified_base 13..14: mod_base = OTHER; note = "2'-deoxy-3'-fluoro nucleoside"
  modified_base 16: mod_base = OTHER; note = "2'-deoxy-3'-fluoro nucleoside"
  modified_base 18: mod_base = OTHER; note = "2'-deoxy-3'-fluoro nucleoside"
  modified_base 20: mod_base = OTHER; note = "2'-deoxy-3'-fluoro nucleoside"
  modified_base 22: mod_base = OTHER; note = "2'-deoxy-3'-fluoro nucleoside"
  modified_base 1: mod_base = OTHER; note = "2'-O-Methyl nucleoside"
  modified_base 3: mod_base = OTHER; note = "2'-O-Methyl nucleoside"
  modified_base 5: mod_base = OTHER; note = "2'-O-Methyl nucleoside"
  modified_base 7: mod_base = OTHER; note = "2'-O-Methyl nucleoside"
  modified_base 9: mod_base = OTHER; note = "2'-O-Methyl nucleoside"
  modified_base 11..12: mod_base = OTHER; note = "2'-O-Methyl nucleoside"
  modified_base 15: mod_base = OTHER; note = "2'-O-Methyl nucleoside"
  modified_base 17: mod_base = OTHER; note = "2'-O-Methyl nucleoside"
  modified_base 19: mod_base = OTHER; note = "2'-O-Methyl nucleoside"
  modified_base 21: mod_base = OTHER; note = "2'-O-Methyl nucleoside"
  modified_base 23..24: mod_base = OTHER; note = "2'-O-Methyl nucleoside"
  modified_base 26: mod_base = OTHER; note = "2'-O-Methyl nucleoside"
  modified_base 2: mod_base = OTHER; note = "phosphorothioate linked nucleoside"
  source 1..26: mol_type = other RNA
taccaatttatgcctacaggccttat

SEQ ID NO: 286 - RNA, 26 nt, synthetic construct
  misc_feature 1..26: note = HBV RNAi trigger antisense strand
  modified_base 25: mod_base = OTHER; note = "2'-hydroxy nucleoside"
  modified_base 2: mod_base = OTHER; note = "2'-deoxy-3'-fluoro nucleoside"
  modified_base 4: mod_base = OTHER; note = "2'-deoxy-3'-fluoro nucleoside"
  modified_base 6: mod_base = OTHER; note = "2'-deoxy-3'-fluoro nucleoside"
  modified_base 8: mod_base = OTHER; note = "2'-deoxy-3'-fluoro nucleoside"
  modified_base 10: mod_base = OTHER; note = "2'-deoxy-3'-fluoro nucleoside"
  modified_base 12: mod_base = OTHER; note = "2'-deoxy-3'-fluoro nucleoside"
  modified_base 14..15: mod_base = OTHER; note = "2'-deoxy-3'-fluoro nucleoside"
  modified_base 18: mod_base = OTHER; note = "2'-deoxy-3'-fluoro nucleoside"
  modified_base 20: mod_base = OTHER; note = "2'-deoxy-3'-fluoro nucleoside"
  modified_base 22: mod_base = OTHER; note = "2'-deoxy-3'-fluoro nucleoside"
  modified_base 1: mod_base = OTHER; note = "2'-O-Methyl nucleoside"
  modified_base 3: mod_base = OTHER; note = "2'-O-Methyl nucleoside"
  modified_base 5: mod_base = OTHER; note = "2'-O-Methyl nucleoside"
  modified_base 7: mod_base = OTHER; note = "2'-O-Methyl nucleoside"
  modified_base 9: mod_base = OTHER; note = "2'-O-Methyl nucleoside"
  modified_base 11: mod_base = OTHER; note = "2'-O-Methyl nucleoside"
  modified_base 13: mod_base = OTHER; note = "2'-O-Methyl nucleoside"
  modified_base 16..17: mod_base = OTHER; note = "2'-O-Methyl nucleoside"
  modified_base 19: mod_base = OTHER; note = "2'-O-Methyl nucleoside"
  modified_base 21: mod_base = OTHER; note = "2'-O-Methyl nucleoside"
  modified_base 23..24: mod_base = OTHER; note = "2'-O-Methyl nucleoside"
  modified_base 26: mod_base = OTHER; note = "2'-O-Methyl nucleoside"
  modified_base 2: mod_base = OTHER; note = "phosphorothioate linked nucleoside"
  source 1..26: mol_type = other RNA
taccaatttatgcctacaggccttat

SEQ ID NO: 287 - RNA, 26 nt, synthetic construct
  misc_feature 1..26: note = HBV RNAi trigger antisense strand
  modified_base 25: mod_base = OTHER; note = "2'-hydroxy nucleoside"
  modified_base 2: mod_base = OTHER; note = "2'-deoxy-3'-fluoro nucleoside"
  modified_base 4: mod_base = OTHER; note = "2'-deoxy-3'-fluoro nucleoside"
  modified_base 6: mod_base = OTHER; note = "2'-deoxy-3'-fluoro nucleoside"
  modified_base 8: mod_base = OTHER; note = "2'-deoxy-3'-fluoro nucleoside"
  modified_base 10: mod_base = OTHER; note = "2'-deoxy-3'-fluoro nucleoside"
  modified_base 13..14: mod_base = OTHER; note = "2'-deoxy-3'-fluoro nucleoside"
  modified_base 16: mod_base = OTHER; note = "2'-deoxy-3'-fluoro nucleoside"
  modified_base 18: mod_base = OTHER; note = "2'-deoxy-3'-fluoro nucleoside"
  modified_base 20: mod_base = OTHER; note = "2'-deoxy-3'-fluoro nucleoside"
  modified_base 22: mod_base = OTHER; note = "2'-deoxy-3'-fluoro nucleoside"
  modified_base 1: mod_base = OTHER; note = "2'-O-Methyl nucleoside"
  modified_base 3: mod_base = OTHER; note = "2'-O-Methyl nucleoside"
  modified_base 5: mod_base = OTHER; note = "2'-O-Methyl nucleoside"
  modified_base 7: mod_base = OTHER; note = "2'-O-Methyl nucleoside"
  modified_base 9: mod_base = OTHER; note = "2'-O-Methyl nucleoside"
  modified_base 11..12: mod_base = OTHER; note = "2'-O-Methyl nucleoside"
  modified_base 15: mod_base = OTHER; note = "2'-O-Methyl nucleoside"
  modified_base 17: mod_base = OTHER; note = "2'-O-Methyl nucleoside"
  modified_base 19: mod_base = OTHER; note = "2'-O-Methyl nucleoside"
  modified_base 21: mod_base = OTHER; note = "2'-O-Methyl nucleoside"
  modified_base 23..24: mod_base = OTHER; note = "2'-O-Methyl nucleoside"
  modified_base 26: mod_base = OTHER; note = "2'-O-Methyl nucleoside"
  modified_base 2: mod_base = OTHER; note = "phosphorothioate linked nucleoside"
  source 1..26: mol_type = other RNA
tatgataaaacgccgcagacacatat

SEQ ID NO: 288 - RNA, 26 nt, synthetic construct
  misc_feature 1..26: note = HBV RNAi trigger antisense strand
  modified_base 25: mod_base = OTHER; note = "2'-hydroxy nucleoside"
  modified_base 2: mod_base = OTHER; note = "2'-deoxy-3'-fluoro nucleoside"
  modified_base 4: mod_base = OTHER; note = "2'-deoxy-3'-fluoro nucleoside"
  modified_base 6: mod_base = OTHER; note = "2'-deoxy-3'-fluoro nucleoside"
  modified_base 8: mod_base = OTHER; note = "2'-deoxy-3'-fluoro nucleoside"
  modified_base 10: mod_base = OTHER; note = "2'-deoxy-3'-fluoro nucleoside"
  modified_base 12: mod_base = OTHER; note = "2'-deoxy-3'-fluoro nucleoside"
  modified_base 14..15: mod_base = OTHER; note = "2'-deoxy-3'-fluoro nucleoside"
  modified_base 18: mod_base = OTHER; note = "2'-deoxy-3'-fluoro nucleoside"
  modified_base 20: mod_base = OTHER; note = "2'-deoxy-3'-fluoro nucleoside"
  modified_base 22: mod_base = OTHER; note = "2'-deoxy-3'-fluoro nucleoside"
  modified_base 1: mod_base = OTHER; note = "2'-O-Methyl nucleoside"
  modified_base 3: mod_base = OTHER; note = "2'-O-Methyl nucleoside"
  modified_base 5: mod_base = OTHER; note = "2'-O-Methyl nucleoside"
  modified_base 7: mod_base = OTHER; note = "2'-O-Methyl nucleoside"
  modified_base 9: mod_base = OTHER; note = "2'-O-Methyl nucleoside"
  modified_base 11: mod_base = OTHER; note = "2'-O-Methyl nucleoside"
  modified_base 13: mod_base = OTHER; note = "2'-O-Methyl nucleoside"
  modified_base 16..17: mod_base = OTHER; note = "2'-O-Methyl nucleoside"
  modified_base 19: mod_base = OTHER; note = "2'-O-Methyl nucleoside"
  modified_base 21: mod_base = OTHER; note = "2'-O-Methyl nucleoside"
  modified_base 23..24: mod_base = OTHER; note = "2'-O-Methyl nucleoside"
  modified_base 26: mod_base = OTHER; note = "2'-O-Methyl nucleoside"
  modified_base 2: mod_base = OTHER; note = "phosphorothioate linked nucleoside"
  source 1..26: mol_type = other RNA
tatgataaaacgccgcagacacatat

SEQ ID NO: 289 - RNA, 26 nt, synthetic construct
  misc_feature 1..26: note = HBV RNAi trigger antisense strand
  modified_base 25: mod_base = OTHER; note = "2'-hydroxy nucleoside"
  modified_base 2: mod_base = OTHER; note = "2'-deoxy-3'-fluoro nucleoside"
  modified_base 4: mod_base = OTHER; note = "2'-deoxy-3'-fluoro nucleoside"
  modified_base 6: mod_base = OTHER; note = "2'-deoxy-3'-fluoro nucleoside"
  modified_base 8: mod_base = OTHER; note = "2'-deoxy-3'-fluoro nucleoside"
  modified_base 10: mod_base = OTHER; note = "2'-deoxy-3'-fluoro nucleoside"
  modified_base 13..14: mod_base = OTHER; note = "2'-deoxy-3'-fluoro nucleoside"
  modified_base 16: mod_base = OTHER; note = "2'-deoxy-3'-fluoro nucleoside"
  modified_base 18: mod_base = OTHER; note = "2'-deoxy-3'-fluoro nucleoside"
  modified_base 20: mod_base = OTHER; note = "2'-deoxy-3'-fluoro nucleoside"
  modified_base 22: mod_base = OTHER; note = "2'-deoxy-3'-fluoro nucleoside"
  modified_base 1: mod_base = OTHER; note = "2'-O-Methyl nucleoside"
  modified_base 3: mod_base = OTHER; note = "2'-O-Methyl nucleoside"
  modified_base 5: mod_base = OTHER; note = "2'-O-Methyl nucleoside"
  modified_base 7: mod_base = OTHER; note = "2'-O-Methyl nucleoside"
  modified_base 9: mod_base = OTHER; note = "2'-O-Methyl nucleoside"
  modified_base 11..12: mod_base = OTHER; note = "2'-O-Methyl nucleoside"
  modified_base 15: mod_base = OTHER; note = "2'-O-Methyl nucleoside"
  modified_base 17: mod_base = OTHER; note = "2'-O-Methyl nucleoside"
  modified_base 19: mod_base = OTHER; note = "2'-O-Methyl nucleoside"
  modified_base 21: mod_base = OTHER; note = "2'-O-Methyl nucleoside"
  modified_base 23..24: mod_base = OTHER; note = "2'-O-Methyl nucleoside"
  modified_base 26: mod_base = OTHER; note = "2'-O-Methyl nucleoside"
  modified_base 2: mod_base = OTHER; note = "phosphorothioate linked nucleoside"
  source 1..26: mol_type = other RNA
tagatgattaggcagaggttgaatat

SEQ ID NO: 290 - RNA, 26 nt, synthetic construct
  misc_feature 1..26: note = HBV RNAi trigger antisense strand
  modified_base 25: mod_base = OTHER; note = "2'-hydroxy nucleoside"
  modified_base 2: mod_base = OTHER; note = "2'-deoxy-3'-fluoro nucleoside"
  modified_base 4: mod_base = OTHER; note = "2'-deoxy-3'-fluoro nucleoside"
  modified_base 6: mod_base = OTHER; note = "2'-deoxy-3'-fluoro nucleoside"
  modified_base 8: mod_base = OTHER; note = "2'-deoxy-3'-fluoro nucleoside"
  modified_base 10: mod_base = OTHER; note = "2'-deoxy-3'-fluoro nucleoside"
  modified_base 12: mod_base = OTHER; note = "2'-deoxy-3'-fluoro nucleoside"
  modified_base 14..15: mod_base = OTHER; note = "2'-deoxy-3'-fluoro nucleoside"
  modified_base 18: mod_base = OTHER; note = "2'-deoxy-3'-fluoro nucleoside"
  modified_base 20: mod_base = OTHER; note = "2'-deoxy-3'-fluoro nucleoside"
  modified_base 22: mod_base = OTHER; note = "2'-deoxy-3'-fluoro nucleoside"
  modified_base 1: mod_base = OTHER; note = "2'-O-Methyl nucleoside"
  modified_base 3: mod_base = OTHER; note = "2'-O-Methyl nucleoside"
  modified_base 5: mod_base = OTHER; note = "2'-O-Methyl nucleoside"
  modified_base 7: mod_base = OTHER; note = "2'-O-Methyl nucleoside"
  modified_base 9: mod_base = OTHER; note = "2'-O-Methyl nucleoside"
  modified_base 11: mod_base = OTHER; note = "2'-O-Methyl nucleoside"
  modified_base 13: mod_base = OTHER; note = "2'-O-Methyl nucleoside"
  modified_base 16..17: mod_base = OTHER; note = "2'-O-Methyl nucleoside"
  modified_base 19: mod_base = OTHER; note = "2'-O-Methyl nucleoside"
  modified_base 21: mod_base = OTHER; note = "2'-O-Methyl nucleoside"
  modified_base 23..24: mod_base = OTHER; note = "2'-O-Methyl nucleoside"
  modified_base 26: mod_base = OTHER; note = "2'-O-Methyl nucleoside"
  modified_base 2: mod_base = OTHER; note = "phosphorothioate linked nucleoside"
  source 1..26: mol_type = other RNA
tagatgattaggcagaggttgaatat

SEQ ID NO: 291 - RNA, 21 nt, synthetic construct
  modified_base 1: mod_base = OTHER; note = thymine
  modified_base 20..21: mod_base = OTHER; note = thymine
  misc_feature 1..21: note = HBV RNAi trigger antisense strand
  modified_base 2: mod_base = OTHER; note = "2'-deoxy-3'-fluoro nucleoside"
  modified_base 4: mod_base = OTHER; note = "2'-deoxy-3'-fluoro nucleoside"
  modified_base 6: mod_base = OTHER; note = "2'-deoxy-3'-fluoro nucleoside"
  modified_base 8: mod_base = OTHER; note = "2'-deoxy-3'-fluoro nucleoside"
  modified_base 10: mod_base = OTHER; note = "2'-deoxy-3'-fluoro nucleoside"
  modified_base 12: mod_base = OTHER; note = "2'-deoxy-3'-fluoro nucleoside"
  modified_base 14: mod_base = OTHER; note = "2'-deoxy-3'-fluoro nucleoside"
  modified_base 16: mod_base = OTHER; note = "2'-deoxy-3'-fluoro nucleoside"
  modified_base 18: mod_base = OTHER; note = "2'-deoxy-3'-fluoro nucleoside"
  modified_base 3: mod_base = OTHER; note = "2'-O-Methyl nucleoside"
  modified_base 5: mod_base = OTHER; note = "2'-O-Methyl nucleoside"
  modified_base 7: mod_base = OTHER; note = "2'-O-Methyl nucleoside"
  modified_base 9: mod_base = OTHER; note = "2'-O-Methyl nucleoside"
  modified_base 11: mod_base = OTHER; note = "2'-O-Methyl nucleoside"
  modified_base 13: mod_base = OTHER; note = "2'-O-Methyl nucleoside"
  modified_base 15: mod_base = OTHER; note = "2'-O-Methyl nucleoside"
  modified_base 17: mod_base = OTHER; note = "2'-O-Methyl nucleoside"
  modified_base 19: mod_base = OTHER; note = "2'-O-Methyl nucleoside"
  modified_base 21: mod_base = OTHER; note = "phosphorothioate linked nucleoside"
  modified_base 1: mod_base = OTHER; note = thymine
  modified_base 20: mod_base = OTHER; note = thymine
  modified_base 21: mod_base = OTHER; note = thymine
  source 1..21: mol_type = other RNA
tgataaaacgccgcagacatt

SEQ ID NO: 292 - RNA, 21 nt, synthetic construct
  modified_base 1: mod_base = OTHER; note = thymine
  modified_base 20..21: mod_base = OTHER; note = thymine
  misc_feature 1..21: note = HBV RNAi trigger antisense strand
  modified_base 2: mod_base = OTHER; note = "2'-deoxy-3'-fluoro nucleoside"
  modified_base 4: mod_base = OTHER; note = "2'-deoxy-3'-fluoro nucleoside"
  modified_base 6: mod_base = OTHER; note = "2'-deoxy-3'-fluoro nucleoside"
  modified_base 8: mod_base = OTHER; note = "2'-deoxy-3'-fluoro nucleoside"
  modified_base 10: mod_base = OTHER; note = "2'-deoxy-3'-fluoro nucleoside"
  modified_base 12: mod_base = OTHER; note = "2'-deoxy-3'-fluoro nucleoside"
  modified_base 14: mod_base = OTHER; note = "2'-deoxy-3'-fluoro nucleoside"
  modified_base 16: mod_base = OTHER; note = "2'-deoxy-3'-fluoro nucleoside"
  modified_base 18: mod_base = OTHER; note = "2'-deoxy-3'-fluoro nucleoside"
  modified_base 3: mod_base = OTHER; note = "2'-O-Methyl nucleoside"
  modified_base 5: mod_base = OTHER; note = "2'-O-Methyl nucleoside"
  modified_base 7: mod_base = OTHER; note = "2'-O-Methyl nucleoside"
  modified_base 9: mod_base = OTHER; note = "2'-O-Methyl nucleoside"
  modified_base 11: mod_base = OTHER; note = "2'-O-Methyl nucleoside"
  modified_base 13: mod_base = OTHER; note = "2'-O-Methyl nucleoside"
  modified_base 15: mod_base = OTHER; note = "2'-O-Methyl nucleoside"
  modified_base 17: mod_base = OTHER; note = "2'-O-Methyl nucleoside"
  modified_base 19: mod_base = OTHER; note = "2'-O-Methyl nucleoside"
  modified_base 21: mod_base = OTHER; note = "phosphorothioate linked nucleoside"
  modified_base 1: mod_base = OTHER; note = thymine
  modified_base 20: mod_base = OTHER; note = thymine
  modified_base 21: mod_base = OTHER; note = thymine
  source 1..21: mol_type = other RNA
tgaacaaatggcactagtatt

SEQ ID NO: 293 - RNA, 21 nt, synthetic construct
  modified_base 1: mod_base = OTHER; note = thymine
  modified_base 20..21: mod_base = OTHER; note = thymine
  misc_feature 1..21: note = HBV RNAi trigger antisense strand
  modified_base 2: mod_base = OTHER; note = "2'-deoxy-3'-fluoro nucleoside"
  modified_base 4: mod_base = OTHER; note = "2'-deoxy-3'-fluoro nucleoside"
  modified_base 6: mod_base = OTHER; note = "2'-deoxy-3'-fluoro nucleoside"
  modified_base 8: mod_base = OTHER; note = "2'-deoxy-3'-fluoro nucleoside"
  modified_base 10: mod_base = OTHER; note = "2'-deoxy-3'-fluoro nucleoside"
  modified_base 12: mod_base = OTHER; note = "2'-deoxy-3'-fluoro nucleoside"
  modified_base 14: mod_base = OTHER; note = "2'-deoxy-3'-fluoro nucleoside"
  modified_base 16: mod_base = OTHER; note = "2'-deoxy-3'-fluoro nucleoside"
  modified_base 18: mod_base = OTHER; note = "2'-deoxy-3'-fluoro nucleoside"
  modified_base 3: mod_base = OTHER; note = "2'-O-Methyl nucleoside"
  modified_base 5: mod_base = OTHER; note = "2'-O-Methyl nucleoside"
  modified_base 7: mod_base = OTHER; note = "2'-O-Methyl nucleoside"
  modified_base 9: mod_base = OTHER; note = "2'-O-Methyl nucleoside"
  modified_base 11: mod_base = OTHER; note = "2'-O-Methyl nucleoside"
  modified_base 13: mod_base = OTHER; note = "2'-O-Methyl nucleoside"
  modified_base 15: mod_base = OTHER; note = "2'-O-Methyl nucleoside"
  modified_base 17: mod_base = OTHER; note = "2'-O-Methyl nucleoside"
  modified_base 19: mod_base = OTHER; note = "2'-O-Methyl nucleoside"
  modified_base 21: mod_base = OTHER; note = "phosphorothioate linked nucleoside"
  modified_base 1: mod_base = OTHER; note = thymine
  modified_base 20: mod_base = OTHER; note = thymine
  modified_base 21: mod_base = OTHER; note = thymine
  source 1..21: mol_type = other RNA
tgcgtcagcaaacacttggtt

SEQ ID NO: 294 - RNA, 21 nt, synthetic construct
  modified_base 1: mod_base = OTHER; note = thymine
  modified_base 20..21: mod_base = OTHER; note = thymine
  misc_feature 1..21: note = HBV RNAi trigger antisense strand
  modified_base 2: mod_base = OTHER; note = "2'-deoxy-3'-fluoro nucleoside"
  modified_base 4: mod_base = OTHER; note = "2'-deoxy-3'-fluoro nucleoside"
  modified_base 6: mod_base = OTHER; note = "2'-deoxy-3'-fluoro nucleoside"
  modified_base 8: mod_base = OTHER; note = "2'-deoxy-3'-fluoro nucleoside"
  modified_base 10: mod_base = OTHER; note = "2'-deoxy-3'-fluoro nucleoside"
  modified_base 12: mod_base = OTHER; note = "2'-deoxy-3'-fluoro nucleoside"
  modified_base 14: mod_base = OTHER; note = "2'-deoxy-3'-fluoro nucleoside"
  modified_base 16: mod_base = OTHER; note = "2'-deoxy-3'-fluoro nucleoside"
  modified_base 18: mod_base = OTHER; note = "2'-deoxy-3'-fluoro nucleoside"
  modified_base 3: mod_base = OTHER; note = "2'-O-Methyl nucleoside"
  modified_base 5: mod_base = OTHER; note = "2'-O-Methyl nucleoside"
  modified_base 7: mod_base = OTHER; note = "2'-O-Methyl nucleoside"
  modified_base 9: mod_base = OTHER; note = "2'-O-Methyl nucleoside"
  modified_base 11: mod_base = OTHER; note = "2'-O-Methyl nucleoside"
  modified_base 13: mod_base = OTHER; note = "2'-O-Methyl nucleoside"
  modified_base 15: mod_base = OTHER; note = "2'-O-Methyl nucleoside"
  modified_base 17: mod_base = OTHER; note = "2'-O-Methyl nucleoside"
  modified_base 19: mod_base = OTHER; note = "2'-O-Methyl nucleoside"
  modified_base 21: mod_base = OTHER; note = "phosphorothioate linked nucleoside"
  modified_base 1: mod_base = OTHER; note = thymine
  modified_base 20: mod_base = OTHER; note = thymine
  modified_base 21: mod_base = OTHER; note = thymine
  source 1..21: mol_type = other RNA
tgaaccactgaacaaatggtt

SEQ ID NO: 295 - RNA, 21 nt, synthetic construct
  modified_base 1: mod_base = OTHER; note = thymine
  modified_base 20..21: mod_base = OTHER; note = thymine
  misc_feature 1..21: note = HBV RNAi trigger antisense strand
  modified_base 2: mod_base = OTHER; note = "2'-deoxy-3'-fluoro nucleoside"
  modified_base 4: mod_base = OTHER; note = "2'-deoxy-3'-fluoro nucleoside"
  modified_base 6: mod_base = OTHER; note = "2'-deoxy-3'-fluoro nucleoside"
  modified_base 8: mod_base = OTHER; note = "2'-deoxy-3'-fluoro nucleoside"
  modified_base 10: mod_base = OTHER; note = "2'-deoxy-3'-fluoro nucleoside"
  modified_base 12: mod_base = OTHER; note = "2'-deoxy-3'-fluoro nucleoside"
  modified_base 14: mod_base = OTHER; note = "2'-deoxy-3'-fluoro nucleoside"
  modified_base 16: mod_base = OTHER; note = "2'-deoxy-3'-fluoro nucleoside"
  modified_base 18: mod_base = OTHER; note = "2'-deoxy-3'-fluoro nucleoside"
  modified_base 3: mod_base = OTHER; note = "2'-O-Methyl nucleoside"
  modified_base 5: mod_base = OTHER; note = "2'-O-Methyl nucleoside"
  modified_base 7: mod_base = OTHER; note = "2'-O-Methyl nucleoside"
  modified_base 9: mod_base = OTHER; note = "2'-O-Methyl nucleoside"
  modified_base 11: mod_base = OTHER; note = "2'-O-Methyl nucleoside"
  modified_base 13: mod_base = OTHER; note = "2'-O-Methyl nucleoside"
  modified_base 15: mod_base = OTHER; note = "2'-O-Methyl nucleoside"
  modified_base 17: mod_base = OTHER; note = "2'-O-Methyl nucleoside"
  modified_base 19: mod_base = OTHER; note = "2'-O-Methyl nucleoside"
  modified_base 21: mod_base = OTHER; note = "phosphorothioate linked nucleoside"
  modified_base 1: mod_base = OTHER; note = thymine
  modified_base 20: mod_base = OTHER; note = thymine
  modified_base 21: mod_base = OTHER; note = thymine
  source 1..21: mol_type = other RNA
taacgggcaacataccttgtt

SEQ ID NO: 296 - RNA, 21 nt, synthetic construct
  modified_base 1: mod_base = OTHER; note = thymine
  modified_base 20..21: mod_base = OTHER; note = thymine
  misc_feature 1..21: note = HBV RNAi trigger antisense strand
  modified_base 2: mod_base = OTHER; note = "2'-deoxy-3'-fluoro nucleoside"
  modified_base 4: mod_base = OTHER; note = "2'-deoxy-3'-fluoro nucleoside"
  modified_base 6: mod_base = OTHER; note = "2'-deoxy-3'-fluoro nucleoside"
  modified_base 8: mod_base = OTHER; note = "2'-deoxy-3'-fluoro nucleoside"
  modified_base 10: mod_base = OTHER; note = "2'-deoxy-3'-fluoro nucleoside"
  modified_base 12: mod_base = OTHER; note = "2'-deoxy-3'-fluoro nucleoside"
  modified_base 14: mod_base = OTHER; note = "2'-deoxy-3'-fluoro nucleoside"
  modified_base 16: mod_base = OTHER; note = "2'-deoxy-3'-fluoro nucleoside"
  modified_base 18: mod_base = OTHER; note = "2'-deoxy-3'-fluoro nucleoside"
  modified_base 3: mod_base = OTHER; note = "2'-O-Methyl nucleoside"
  modified_base 5: mod_base = OTHER; note = "2'-O-Methyl nucleoside"
  modified_base 7: mod_base = OTHER; note = "2'-O-Methyl nucleoside"
  modified_base 9: mod_base = OTHER; note = "2'-O-Methyl nucleoside"
  modified_base 11: mod_base = OTHER; note = "2'-O-Methyl nucleoside"
  modified_base 13: mod_base = OTHER; note = "2'-O-Methyl nucleoside"
  modified_base 15: mod_base = OTHER; note = "2'-O-Methyl nucleoside"
  modified_base 17: mod_base = OTHER; note = "2'-O-Methyl nucleoside"
  modified_base 19: mod_base = OTHER; note = "2'-O-Methyl nucleoside"
  modified_base 21: mod_base = OTHER; note = "phosphorothioate linked nucleoside"
  modified_base 1: mod_base = OTHER; note = thymine
  modified_base 20: mod_base = OTHER; note = thymine
  modified_base 21: mod_base = OTHER; note = thymine
  source 1..21: mol_type = other RNA
tactagtaaactgagccagtt

SEQ ID NO: 297 - RNA, 21 nt, synthetic construct
  modified_base 1: mod_base = OTHER; note = thymine
  modified_base 20..21: mod_base = OTHER; note = thymine
  misc_feature 1..21: note = HBV RNAi trigger antisense strand
  modified_base 2: mod_base = OTHER; note = "2'-deoxy-3'-fluoro nucleoside"
  modified_base 4: mod_base = OTHER; note = "2'-deoxy-3'-fluoro nucleoside"
  modified_base 6: mod_base = OTHER; note = "2'-deoxy-3'-fluoro nucleoside"
  modified_base 8: mod_base = OTHER; note = "2'-deoxy-3'-fluoro nucleoside"
  modified_base 10: mod_base = OTHER; note = "2'-deoxy-3'-fluoro nucleoside"
  modified_base 12: mod_base = OTHER; note = "2'-deoxy-3'-fluoro nucleoside"
  modified_base 14: mod_base = OTHER; note = "2'-deoxy-3'-fluoro nucleoside"
  modified_base 16: mod_base = OTHER; note = "2'-deoxy-3'-fluoro nucleoside"
  modified_base 18: mod_base = OTHER; note = "2'-deoxy-3'-fluoro nucleoside"
  modified_base 3: mod_base = OTHER; note = "2'-O-Methyl nucleoside"
  modified_base 5: mod_base = OTHER; note = "2'-O-Methyl nucleoside"
  modified_base 7: mod_base = OTHER; note = "2'-O-Methyl nucleoside"
  modified_base 9: mod_base = OTHER; note = "2'-O-Methyl nucleoside"
  modified_base 11: mod_base = OTHER; note = "2'-O-Methyl nucleoside"
  modified_base 13: mod_base = OTHER; note = "2'-O-Methyl nucleoside"
  modified_base 15: mod_base = OTHER; note = "2'-O-Methyl nucleoside"
  modified_base 17: mod_base = OTHER; note = "2'-O-Methyl nucleoside"
  modified_base 19: mod_base = OTHER; note = "2'-O-Methyl nucleoside"
  modified_base 21: mod_base = OTHER; note = "phosphorothioate linked nucleoside"
  modified_base 1: mod_base = OTHER; note = thymine
  modified_base 20: mod_base = OTHER; note = thymine
  modified_base 21: mod_base = OTHER; note = thymine
  source 1..21: mol_type = other RNA
tggacaaacgggcaacatatt

SEQ ID NO: 298 - RNA, 21 nt, synthetic construct
  modified_base 1: mod_base = OTHER; note = thymine
  modified_base 20..21: mod_base = OTHER; note = thymine
  misc_feature 1..21: note = HBV RNAi trigger antisense strand
  modified_base 2: mod_base = OTHER; note = "2'-deoxy-3'-fluoro nucleoside"
  modified_base 4: mod_base = OTHER; note = "2'-deoxy-3'-fluoro nucleoside"
  modified_base 6: mod_base = OTHER; note = "2'-deoxy-3'-fluoro nucleoside"
  modified_base 8: mod_base = OTHER; note = "2'-deoxy-3'-fluoro nucleoside"
  modified_base 10: mod_base = OTHER; note = "2'-deoxy-3'-fluoro nucleoside"
  modified_base 12: mod_base = OTHER; note = "2'-deoxy-3'-fluoro nucleoside"
  modified_base 14: mod_base = OTHER; note = "2'-deoxy-3'-fluoro nucleoside"
  modified_base 16: mod_base = OTHER; note = "2'-deoxy-3'-fluoro nucleoside"
  modified_base 18: mod_base = OTHER; note = "2'-deoxy-3'-fluoro nucleoside"
  modified_base 3: mod_base = OTHER; note = "2'-O-Methyl nucleoside"
  modified_base 5: mod_base = OTHER; note = "2'-O-Methyl nucleoside"
  modified_base 7: mod_base = OTHER; note = "2'-O-Methyl nucleoside"
  modified_base 9: mod_base = OTHER; note = "2'-O-Methyl nucleoside"
  modified_base 11: mod_base = OTHER; note = "2'-O-Methyl nucleoside"
  modified_base 13: mod_base = OTHER; note = "2'-O-Methyl nucleoside"
  modified_base 15: mod_base = OTHER; note = "2'-O-Methyl nucleoside"
  modified_base 17: mod_base = OTHER; note = "2'-O-Methyl nucleoside"
  modified_base 19: mod_base = OTHER; note = "2'-O-Methyl nucleoside"
  modified_base 21: mod_base = OTHER; note = "phosphorothioate linked nucleoside"
  modified_base 1: mod_base = OTHER; note = thymine
  modified_base 20: mod_base = OTHER; note = thymine
  modified_base 21: mod_base = OTHER; note = thymine
  source 1..21: mol_type = other RNA
tacgggcaacataccttgatt

SEQ ID NO: 299 - RNA, 21 nt, synthetic construct
  modified_base 1: mod_base = OTHER; note = thymine
  modified_base 20..21: mod_base = OTHER; note = thymine
  misc_feature 1..21: note = HBV RNAi trigger antisense strand
  modified_base 2: mod_base = OTHER; note = "2'-deoxy-3'-fluoro nucleoside"
  modified_base 4: mod_base = OTHER; note = "2'-deoxy-3'-fluoro nucleoside"
  modified_base 6: mod_base = OTHER; note = "2'-deoxy-3'-fluoro nucleoside"
  modified_base 8: mod_base = OTHER; note = "2'-deoxy-3'-fluoro nucleoside"
  modified_base 10: mod_base = OTHER; note = "2'-deoxy-3'-fluoro nucleoside"
  modified_base 12: mod_base = OTHER; note = "2'-deoxy-3'-fluoro nucleoside"
  modified_base 14: mod_base = OTHER; note = "2'-deoxy-3'-fluoro nucleoside"
  modified_base 16: mod_base = OTHER; note = "2'-deoxy-3'-fluoro nucleoside"
  modified_base 18: mod_base = OTHER; note = "2'-deoxy-3'-fluoro nucleoside"
  modified_base 3: mod_base = OTHER; note = "2'-O-Methyl nucleoside"
  modified_base 5: mod_base = OTHER; note = "2'-O-Methyl nucleoside"
  modified_base 7: mod_base = OTHER; note = "2'-O-Methyl nucleoside"
  modified_base 9: mod_base = OTHER; note = "2'-O-Methyl nucleoside"
  modified_base 11: mod_base = OTHER; note = "2'-O-Methyl nucleoside"
  modified_base 13: mod_base = OTHER; note = "2'-O-Methyl nucleoside"
  modified_base 15: mod_base = OTHER; note = "2'-O-Methyl nucleoside"
  modified_base 17: mod_base = OTHER; note = "2'-O-Methyl nucleoside"
  modified_base 19: mod_base = OTHER; note = "2'-O-Methyl nucleoside"
  modified_base 21: mod_base = OTHER; note = "phosphorothioate linked nucleoside"
  modified_base 1: mod_base = OTHER; note = thymine
  modified_base 20: mod_base = OTHER; note = thymine
  modified_base 21: mod_base = OTHER; note = thymine
  source 1..21: mol_type = other RNA
tgaagcgaagtgcacacggtt

SEQ ID NO: 300 - RNA, 21 nt, synthetic construct
  modified_base 1: mod_base = OTHER; note = thymine
  modified_base 20..21: mod_base = OTHER; note = thymine
  misc_feature 1..21: note = HBV RNAi trigger antisense strand
  modified_base 2: mod_base = OTHER; note = "2'-deoxy-3'-fluoro nucleoside"
  modified_base 4: mod_base = OTHER; note = "2'-deoxy-3'-fluoro nucleoside"
  modified_base 6: mod_base = OTHER; note = "2'-deoxy-3'-fluoro nucleoside"
  modified_base 8: mod_base = OTHER; note = "2'-deoxy-3'-fluoro nucleoside"
  modified_base 10: mod_base = OTHER; note = "2'-deoxy-3'-fluoro nucleoside"
  modified_base 12: mod_base = OTHER; note = "2'-deoxy-3'-fluoro nucleoside"
  modified_base 14: mod_base = OTHER; note = "2'-deoxy-3'-fluoro nucleoside"
  modified_base 16: mod_base = OTHER; note = "2'-deoxy-3'-fluoro nucleoside"
  modified_base 18: mod_base = OTHER; note = "2'-deoxy-3'-fluoro nucleoside"
  modified_base 3: mod_base = OTHER; note = "2'-O-Methyl nucleoside"
  modified_base 5: mod_base = OTHER; note = "2'-O-Methyl nucleoside"
  modified_base 7: mod_base = OTHER; note = "2'-O-Methyl nucleoside"
  modified_base 9: mod_base = OTHER; note = "2'-O-Methyl nucleoside"
  modified_base 11: mod_base = OTHER; note = "2'-O-Methyl nucleoside"
  modified_base 13: mod_base = OTHER; note = "2'-O-Methyl nucleoside"
  modified_base 15: mod_base = OTHER; note = "2'-O-Methyl nucleoside"
  modified_base 17: mod_base = OTHER; note = "2'-O-Methyl nucleoside"
  modified_base 19: mod_base = OTHER; note = "2'-O-Methyl nucleoside"
  modified_base 21: mod_base = OTHER; note = "phosphorothioate linked nucleoside"
  modified_base 1: mod_base = OTHER; note = thymine
  modified_base 20: mod_base = OTHER; note = thymine
  modified_base 21: mod_base = OTHER; note = thymine
  source 1..21: mol_type = other RNA
ttccgcgggattcagcgcctt

SEQ ID NO: 301 - RNA, 26 nt, synthetic construct
  misc_feature 1..26: note = HBV RNAi trigger antisense strand
  modified_base 25: mod_base = OTHER; note = "2'-hydroxy nucleoside"
  modified_base 2: mod_base = OTHER; note = "2'-deoxy-3'-fluoro nucleoside"
  modified_base 4: mod_base = OTHER; note = "2'-deoxy-3'-fluoro nucleoside"
  modified_base 6: mod_base = OTHER; note = "2'-deoxy-3'-fluoro nucleoside"
  modified_base 8: mod_base = OTHER; note = "2'-deoxy-3'-fluoro nucleoside"
  modified_base 10: mod_base = OTHER; note = "2'-deoxy-3'-fluoro nucleoside"
  modified_base 12: mod_base = OTHER; note = "2'-deoxy-3'-fluoro nucleoside"
  modified_base 14: mod_base = OTHER; note = "2'-deoxy-3'-fluoro nucleoside"
  modified_base 16: mod_base = OTHER; note = "2'-deoxy-3'-fluoro nucleoside"
  modified_base 18: mod_base = OTHER; note = "2'-deoxy-3'-fluoro nucleoside"
  modified_base 20: mod_base = OTHER; note = "2'-deoxy-3'-fluoro nucleoside"
  modified_base 1: mod_base = OTHER; note = "2'-O-Methyl nucleoside"
  modified_base 3: mod_base = OTHER; note = "2'-O-Methyl nucleoside"
  modified_base 5: mod_base = OTHER; note = "2'-O-Methyl nucleoside"
  modified_base 7: mod_base = OTHER; note = "2'-O-Methyl nucleoside"
  modified_base 9: mod_base = OTHER; note = "2'-O-Methyl nucleoside"
  modified_base 11: mod_base = OTHER; note = "2'-O-Methyl nucleoside"
  modified_base 13: mod_base = OTHER; note = "2'-O-Methyl nucleoside"
  modified_base 15: mod_base = OTHER; note = "2'-O-Methyl nucleoside"
  modified_base 17: mod_base = OTHER; note = "2'-O-Methyl nucleoside"
  modified_base 19: mod_base = OTHER; note = "2'-O-Methyl nucleoside"
  modified_base 21..24: mod_base = OTHER; note = "2'-O-Methyl nucleoside"
  modified_base 26: mod_base = OTHER; note = "2'-O-Methyl nucleoside"
  modified_base 2..3: mod_base = OTHER; note = "phosphorothioate linked nucleoside"
  modified_base 23..24: mod_base = OTHER; note = "phosphorothioate linked nucleoside"
  source 1..26: mol_type = other RNA
tgaacaaatggcactagtaaacttat

SEQ ID NO: 302 - RNA, 26 nt, synthetic construct
  misc_feature 1..26: note = HBV RNAi trigger antisense strand
  modified_base 25: mod_base = OTHER; note = "2'-hydroxy nucleoside"
  modified_base 2: mod_base = OTHER; note = "2'-deoxy-3'-fluoro nucleoside"
  modified_base 4: mod_base = OTHER; note = "2'-deoxy-3'-fluoro nucleoside"
  modified_base 6: mod_base = OTHER; note = "2'-deoxy-3'-fluoro nucleoside"
  modified_base 8: mod_base = OTHER; note = "2'-deoxy-3'-fluoro nucleoside"
  modified_base 10: mod_base = OTHER; note = "2'-deoxy-3'-fluoro nucleoside"
  modified_base 12: mod_base = OTHER; note = "2'-deoxy-3'-fluoro nucleoside"
  modified_base 14: mod_base = OTHER; note = "2'-deoxy-3'-fluoro nucleoside"
  modified_base 16: mod_base = OTHER; note = "2'-deoxy-3'-fluoro nucleoside"
  modified_base 18: mod_base = OTHER; note = "2'-deoxy-3'-fluoro nucleoside"
  modified_base 20: mod_base = OTHER; note = "2'-deoxy-3'-fluoro nucleoside"
  modified_base 1: mod_base = OTHER; note = "2'-O-Methyl nucleoside"
  modified_base 3: mod_base = OTHER; note = "2'-O-Methyl nucleoside"
  modified_base 5: mod_base = OTHER; note = "2'-O-Methyl nucleoside"
  modified_base 7: mod_base = OTHER; note = "2'-O-Methyl nucleoside"
  modified_base 9: mod_base = OTHER; note = "2'-O-Methyl nucleoside"
  modified_base 11: mod_base = OTHER; note = "2'-O-Methyl nucleoside"
  modified_base 13: mod_base = OTHER; note = "2'-O-Methyl nucleoside"
  modified_base 15: mod_base = OTHER; note = "2'-O-Methyl nucleoside"
  modified_base 17: mod_base = OTHER; note = "2'-O-Methyl nucleoside"
  modified_base 19: mod_base = OTHER; note = "2'-O-Methyl nucleoside"
  modified_base 21..24: mod_base = OTHER; note = "2'-O-Methyl nucleoside"
  modified_base 26: mod_base = OTHER; note = "2'-O-Methyl nucleoside"
  modified_base 2: mod_base = OTHER; note = "phosphorothioate linked nucleoside"
  modified_base 23..24: mod_base = OTHER; note = "phosphorothioate linked nucleoside"
  source 1..26: mol_type = other RNA
tggacaaacgggcaacatacctttat

SEQ ID NO: 303 - RNA, 26 nt, synthetic construct
  misc_feature 1..26: note = HBV RNAi trigger antisense strand
  modified_base 25: mod_base = OTHER; note = "2'-hydroxy nucleoside"
  modified_base 2: mod_base = OTHER; note = "2'-deoxy-3'-fluoro nucleoside"
  modified_base 4: mod_base = OTHER; note = "2'-deoxy-3'-fluoro nucleoside"
  modified_base 6: mod_base = OTHER; note = "2'-deoxy-3'-fluoro nucleoside"
  modified_base 8: mod_base = OTHER; note = "2'-deoxy-3'-fluoro nucleoside"
  modified_base 10: mod_base = OTHER; note = "2'-deoxy-3'-fluoro nucleoside"
  modified_base 12: mod_base = OTHER; note = "2'-deoxy-3'-fluoro nucleoside"
  modified_base 14: mod_base = OTHER; note = "2'-deoxy-3'-fluoro nucleoside"
  modified_base 16: mod_base = OTHER; note = "2'-deoxy-3'-fluoro nucleoside"
  modified_base 18: mod_base = OTHER; note = "2'-deoxy-3'-fluoro nucleoside"
  modified_base 20: mod_base = OTHER; note = "2'-deoxy-3'-fluoro nucleoside"
  modified_base 1: mod_base = OTHER; note = "2'-O-Methyl nucleoside"
  modified_base 3: mod_base = OTHER; note = "2'-O-Methyl nucleoside"
  modified_base 5: mod_base = OTHER; note = "2'-O-Methyl nucleoside"
  modified_base 7: mod_base = OTHER; note = "2'-O-Methyl nucleoside"
  modified_base 9: mod_base = OTHER; note = "2'-O-Methyl nucleoside"
  modified_base 11: mod_base = OTHER; note = "2'-O-Methyl nucleoside"
  modified_base 13: mod_base = OTHER; note = "2'-O-Methyl nucleoside"
  modified_base 15: mod_base = OTHER; note = "2'-O-Methyl nucleoside"
  modified_base 17: mod_base = OTHER; note = "2'-O-Methyl nucleoside"
  modified_base 19: mod_base = OTHER; note = "2'-O-Methyl nucleoside"
  modified_base 21..24: mod_base = OTHER; note = "2'-O-Methyl nucleoside"
  modified_base 26: mod_base = OTHER; note = "2'-O-Methyl nucleoside"
  modified_base 2..3: mod_base = OTHER; note = "phosphorothioate linked nucleoside"
  modified_base 23..24: mod_base = OTHER; note = "phosphorothioate linked nucleoside"
  source 1..26: mol_type = other RNA
tgaagcgaagtgcacacggaccgtat

SEQ ID NO: 304 - RNA, 26 nt, synthetic construct
  misc_feature 1..26: note = HBV RNAi trigger antisense strand
  modified_base 25: mod_base = OTHER; note = "2'-hydroxy nucleoside"
  modified_base 2: mod_base = OTHER; note = "2'-deoxy-3'-fluoro nucleoside"
  modified_base 4: mod_base = OTHER; note = "2'-deoxy-3'-fluoro nucleoside"
  modified_base 6: mod_base = OTHER; note = "2'-deoxy-3'-fluoro nucleoside"
  modified_base 8: mod_base = OTHER; note = "2'-deoxy-3'-fluoro nucleoside"
  modified_base 10: mod_base = OTHER; note = "2'-deoxy-3'-fluoro nucleoside"
  modified_base 12: mod_base = OTHER; note = "2'-deoxy-3'-fluoro nucleoside"
  modified_base 14: mod_base = OTHER; note = "2'-deoxy-3'-fluoro nucleoside"
  modified_base 16: mod_base = OTHER; note = "2'-deoxy-3'-fluoro nucleoside"
  modified_base 18: mod_base = OTHER; note = "2'-deoxy-3'-fluoro nucleoside"
  modified_base 20: mod_base = OTHER; note = "2'-deoxy-3'-fluoro nucleoside"
  modified_base 1: mod_base = OTHER; note = "2'-O-Methyl nucleoside"
  modified_base 3: mod_base = OTHER; note = "2'-O-Methyl nucleoside"
  modified_base 5: mod_base = OTHER; note = "2'-O-Methyl nucleoside"
  modified_base 7: mod_base = OTHER; note = "2'-O-Methyl nucleoside"
  modified_base 9: mod_base = OTHER; note = "2'-O-Methyl nucleoside"
  modified_base 11: mod_base = OTHER; note = "2'-O-Methyl nucleoside"
  modified_base 13: mod_base = OTHER; note = "2'-O-Methyl nucleoside"
  modified_base 15: mod_base = OTHER; note = "2'-O-Methyl nucleoside"
  modified_base 17: mod_base = OTHER; note = "2'-O-Methyl nucleoside"
  modified_base 19: mod_base = OTHER; note = "2'-O-Methyl nucleoside"
  modified_base 21..24: mod_base = OTHER; note = "2'-O-Methyl nucleoside"
  modified_base 26: mod_base = OTHER; note = "2'-O-Methyl nucleoside"
  modified_base 2..3: mod_base = OTHER; note = "phosphorothioate linked nucleoside"
  modified_base 23..24: mod_base = OTHER; note = "phosphorothioate linked nucleoside"
  source 1..26: mol_type = other RNA
taccaatttatgcctacaggccttat

SEQ ID NO: 305 - RNA, 26 nt, synthetic construct
  misc_feature 1..26: note = HBV RNAi trigger antisense strand
  modified_base 25: mod_base = OTHER; note = "2'-hydroxy nucleoside"
  modified_base 2: mod_base = OTHER; note = "2'-deoxy-3'-fluoro nucleoside"
  modified_base 4: mod_base = OTHER; note = "2'-deoxy-3'-fluoro nucleoside"
  modified_base 6: mod_base = OTHER; note = "2'-deoxy-3'-fluoro nucleoside"
  modified_base 8: mod_base = OTHER; note = "2'-deoxy-3'-fluoro nucleoside"
  modified_base 10: mod_base = OTHER; note = "2'-deoxy-3'-fluoro nucleoside"
  modified_base 12: mod_base = OTHER; note = "2'-deoxy-3'-fluoro nucleoside"
  modified_base 14: mod_base = OTHER; note = "2'-deoxy-3'-fluoro nucleoside"
  modified_base 16: mod_base = OTHER; note = "2'-deoxy-3'-fluoro nucleoside"
  modified_base 18: mod_base = OTHER; note = "2'-deoxy-3'-fluoro nucleoside"
  modified_base 20: mod_base = OTHER; note = "2'-deoxy-3'-fluoro nucleoside"
  modified_base 1: mod_base = OTHER; note = "2'-O-Methyl nucleoside"
  modified_base 3: mod_base = OTHER; note = "2'-O-Methyl nucleoside"
  modified_base 5: mod_base = OTHER; note = "2'-O-Methyl nucleoside"
  modified_base 7: mod_base = OTHER; note = "2'-O-Methyl nucleoside"
  modified_base 9: mod_base = OTHER; note = "2'-O-Methyl nucleoside"
  modified_base 11: mod_base = OTHER; note = "2'-O-Methyl nucleoside"
  modified_base 13: mod_base = OTHER; note = "2'-O-Methyl nucleoside"
  modified_base 15: mod_base = OTHER; note = "2'-O-Methyl nucleoside"
  modified_base 17: mod_base = OTHER; note = "2'-O-Methyl nucleoside"
  modified_base 19: mod_base = OTHER; note = "2'-O-Methyl nucleoside"
  modified_base 21..24: mod_base = OTHER; note = "2'-O-Methyl nucleoside"
  modified_base 26: mod_base = OTHER; note = "2'-O-Methyl nucleoside"
  modified_base 2..3: mod_base = OTHER; note = "phosphorothioate linked nucleoside"
  modified_base 23..24: mod_base = OTHER; note = "phosphorothioate linked nucleoside"
  source 1..26: mol_type = other RNA
tagatgattaggcagaggttgaatat

SEQ ID NO: 306 - RNA, 26 nt, synthetic construct
  misc_feature 1..26: note = HBV RNAi trigger antisense strand
  modified_base 25: mod_base = OTHER; note = "2'-hydroxy nucleoside"
  modified_base 2: mod_base = OTHER; note = "2'-deoxy-3'-fluoro nucleoside"
  modified_base 8: mod_base = OTHER; note = "2'-deoxy-3'-fluoro nucleoside"
  modified_base 10: mod_base = OTHER; note = "2'-deoxy-3'-fluoro nucleoside"
  modified_base 14: mod_base = OTHER; note = "2'-deoxy-3'-fluoro nucleoside"
  modified_base 1: mod_base = OTHER; note = "2'-O-Methyl nucleoside"
  modified_base 3..6: mod_base = OTHER; note = "2'-O-Methyl nucleoside"
  modified_base 7: mod_base = OTHER; note = "2'-O-Methyl nucleoside"
  modified_base 9: mod_base = OTHER; note = "2'-O-Methyl nucleoside"
  modified_base 11..13: mod_base = OTHER; note = "2'-O-Methyl nucleoside"
  modified_base 15..24: mod_base = OTHER; note = "2'-O-Methyl nucleoside"
  modified_base 26: mod_base = OTHER; note = "2'-O-Methyl nucleoside"
  modified_base 2..3: mod_base = OTHER; note = "phosphorothioate linked nucleoside"
  modified_base 23..24: mod_base = OTHER; note = "phosphorothioate linked nucleoside"
  source 1..26: mol_type = other RNA
tgaacaaatggcactagtaaacttat

SEQ ID NO: 307 - RNA, 26 nt, synthetic construct
  misc_feature 1..26: note = HBV RNAi trigger antisense strand
  modified_base 25: mod_base = OTHER; note = "2'-hydroxy nucleoside"
  modified_base 2: mod_base = OTHER; note = "2'-deoxy-3'-fluoro nucleoside"
  modified_base 8: mod_base = OTHER; note = "2'-deoxy-3'-fluoro nucleoside"
  modified_base 10: mod_base = OTHER; note = "2'-deoxy-3'-fluoro nucleoside"
  modified_base 14: mod_base = OTHER; note = "2'-deoxy-3'-fluoro nucleoside"
  modified_base 1: mod_base = OTHER; note = "2'-O-Methyl nucleoside"
  modified_base 3..6: mod_base = OTHER; note = "2'-O-Methyl nucleoside"
  modified_base 7: mod_base = OTHER; note = "2'-O-Methyl nucleoside"
  modified_base 9: mod_base = OTHER; note = "2'-O-Methyl nucleoside"
  modified_base 11..13: mod_base = OTHER; note = "2'-O-Methyl nucleoside"
  modified_base 15..24: mod_base = OTHER; note = "2'-O-Methyl nucleoside"
  modified_base 26: mod_base = OTHER; note = "2'-O-Methyl nucleoside"
  modified_base 2: mod_base = OTHER; note = "phosphorothioate linked nucleoside"
  modified_base 23..24: mod_base = OTHER; note = "phosphorothioate linked nucleoside"
  source 1..26: mol_type = other RNA
tggacaaacgggcaacatacctttat

SEQ ID NO: 308 - RNA, 26 nt, synthetic construct
  misc_feature 1..26: note = HBV RNAi trigger antisense strand
  modified_base 25: mod_base = OTHER; note = "2'-hydroxy nucleoside"
  modified_base 2: mod_base = OTHER; note = "2'-deoxy-3'-fluoro nucleoside"
  modified_base 8: mod_base = OTHER; note = "2'-deoxy-3'-fluoro nucleoside"
  modified_base 10: mod_base = OTHER; note = "2'-deoxy-3'-fluoro nucleoside"
  modified_base 14: mod_base = OTHER; note = "2'-deoxy-3'-fluoro nucleoside"
  modified_base 1: mod_base = OTHER; note = "2'-O-Methyl nucleoside"
  modified_base 3..6: mod_base = OTHER; note = "2'-O-Methyl nucleoside"
  modified_base 7: mod_base = OTHER; note = "2'-O-Methyl nucleoside"
  modified_base 9: mod_base = OTHER; note = "2'-O-Methyl nucleoside"
  modified_base 11..13: mod_base = OTHER; note = "2'-O-Methyl nucleoside"
  modified_base 15..24: mod_base = OTHER; note = "2'-O-Methyl nucleoside"
  modified_base 26: mod_base = OTHER; note = "2'-O-Methyl nucleoside"
  modified_base 2..3: mod_base = OTHER; note = "phosphorothioate linked nucleoside"
  modified_base 23..24: mod_base = OTHER; note = "phosphorothioate linked nucleoside"
  source 1..26: mol_type = other RNA
tgaagcgaagtgcacacggaccgtat

SEQ ID NO: 309 - RNA, 26 nt, synthetic construct
  misc_feature 1..26: note = HBV RNAi trigger antisense strand
  modified_base 25: mod_base = OTHER; note = "2'-hydroxy nucleoside"
  modified_base 2: mod_base = OTHER; note = "2'-deoxy-3'-fluoro nucleoside"
  modified_base 8: mod_base = OTHER; note = "2'-deoxy-3'-fluoro nucleoside"
  modified_base 10: mod_base = OTHER; note = "2'-deoxy-3'-fluoro nucleoside"
  modified_base 14: mod_base = OTHER; note = "2'-deoxy-3'-fluoro nucleoside"
  modified_base 1: mod_base = OTHER; note = "2'-O-Methyl nucleoside"
  modified_base 3..6: mod_base = OTHER; note = "2'-O-Methyl nucleoside"
  modified_base 7: mod_base = OTHER; note = "2'-O-Methyl nucleoside"
  modified_base 9: mod_base = OTHER; note = "2'-O-Methyl nucleoside"
  modified_base 11..13: mod_base = OTHER; note = "2'-O-Methyl nucleoside"
  modified_base 15..24: mod_base = OTHER; note = "2'-O-Methyl nucleoside"
  modified_base 26: mod_base = OTHER; note = "2'-O-Methyl nucleoside"
  modified_base 2..3: mod_base = OTHER; note = "phosphorothioate linked nucleoside"
  modified_base 23..24: mod_base = OTHER; note = "phosphorothioate linked nucleoside"
  source 1..26: mol_type = other RNA
taccaatttatgcctacaggccttat

SEQ ID NO: 310 - RNA, 26 nt, synthetic construct
  misc_feature 1..26: note = HBV RNAi trigger antisense strand
  modified_base 25: mod_base = OTHER; note = "2'-hydroxy nucleoside"
  modified_base 2: mod_base = OTHER; note = "2'-deoxy-3'-fluoro nucleoside"
  modified_base 8: mod_base = OTHER; note = "2'-deoxy-3'-fluoro nucleoside"
  modified_base 10: mod_base = OTHER; note = "2'-deoxy-3'-fluoro nucleoside"
  modified_base 14: mod_base = OTHER; note = "2'-deoxy-3'-fluoro nucleoside"
  modified_base 1: mod_base = OTHER; note = "2'-O-Methyl nucleoside"
  modified_base 3..6: mod_base = OTHER; note = "2'-O-Methyl nucleoside"
  modified_base 7: mod_base = OTHER; note = "2'-O-Methyl nucleoside"
  modified_base 9: mod_base = OTHER; note = "2'-O-Methyl nucleoside"
  modified_base 11..13: mod_base = OTHER; note = "2'-O-Methyl nucleoside"
  modified_base 15..24: mod_base = OTHER; note = "2'-O-Methyl nucleoside"
  modified_base 26: mod_base = OTHER; note = "2'-O-Methyl nucleoside"
  modified_base 2..3: mod_base = OTHER; note = "phosphorothioate linked nucleoside"
  modified_base 23..24: mod_base = OTHER; note = "phosphorothioate linked nucleoside"
  source 1..26: mol_type = other RNA
tagatgattaggcagaggttgaatat

SEQ ID NO: 311 - RNA, 26 nt, synthetic construct
  misc_feature 1..26: note = HBV RNAi trigger antisense strand
  modified_base 25: mod_base = OTHER; note = "2'-hydroxy nucleoside"
  modified_base 2: mod_base = OTHER; note = "2'-deoxy-3'-fluoro nucleoside"
  modified_base 4: mod_base = OTHER; note = "2'-deoxy-3'-fluoro nucleoside"
  modified_base 6: mod_base = OTHER; note = "2'-deoxy-3'-fluoro nucleoside"
  modified_base 8: mod_base = OTHER; note = "2'-deoxy-3'-fluoro nucleoside"
  modified_base 10: mod_base = OTHER; note = "2'-deoxy-3'-fluoro nucleoside"
  modified_base 12: mod_base = OTHER; note = "2'-deoxy-3'-fluoro nucleoside"
  modified_base 14: mod_base = OTHER; note = "2'-deoxy-3'-fluoro nucleoside"
  modified_base 16: mod_base = OTHER; note = "2'-deoxy-3'-fluoro nucleoside"
  modified_base 18: mod_base = OTHER; note = "2'-deoxy-3'-fluoro nucleoside"
  modified_base 20: mod_base = OTHER; note = "2'-deoxy-3'-fluoro nucleoside"
  modified_base 1: mod_base = OTHER; note = "2'-O-Methyl nucleoside"
  modified_base 3: mod_base = OTHER; note = "2'-O-Methyl nucleoside"
  modified_base 5: mod_base = OTHER; note = "2'-O-Methyl nucleoside"
  modified_base 7: mod_base = OTHER; note = "2'-O-Methyl nucleoside"
  modified_base 9: mod_base = OTHER; note = "2'-O-Methyl nucleoside"
  modified_base 11: mod_base = OTHER; note = "2'-O-Methyl nucleoside"
  modified_base 13: mod_base = OTHER; note = "2'-O-Methyl nucleoside"
  modified_base 15: mod_base = OTHER; note = "2'-O-Methyl nucleoside"
  modified_base 17: mod_base = OTHER; note = "2'-O-Methyl nucleoside"
  modified_base 19: mod_base = OTHER; note = "2'-O-Methyl nucleoside"
  modified_base 21..24: mod_base = OTHER; note = "2'-O-Methyl nucleoside"
  modified_base 26: mod_base = OTHER; note = "2'-O-Methyl nucleoside"
  modified_base 2..3: mod_base = OTHER; note = "phosphorothioate linked nucleoside"
  modified_base 23..24: mod_base = OTHER; note = "phosphorothioate linked nucleoside"
  source 1..26: mol_type = other RNA
tggacaaacgggcaacatacctttat

SEQ ID NO: 312 - RNA, 26 nt, synthetic construct
  misc_feature 1..26: note = HBV RNAi trigger antisense strand
  modified_base 25: mod_base = OTHER; note = "2'-hydroxy nucleoside"
  modified_base 2: mod_base = OTHER; note = "2'-deoxy-3'-fluoro nucleoside"
  modified_base 8: mod_base = OTHER; note = "2'-deoxy-3'-fluoro nucleoside"
  modified_base 10: mod_base = OTHER; note = "2'-deoxy-3'-fluoro nucleoside"
  modified_base 14: mod_base = OTHER; note = "2'-deoxy-3'-fluoro nucleoside"
  modified_base 1: mod_base = OTHER; note = "2'-O-Methyl nucleoside"
  modified_base 3..6: mod_base = OTHER; note = "2'-O-Methyl nucleoside"
  modified_base 7: mod_base = OTHER; note = "2'-O-Methyl nucleoside"
  modified_base 9: mod_base = OTHER; note = "2'-O-Methyl nucleoside"
  modified_base 11..13: mod_base = OTHER; note = "2'-O-Methyl nucleoside"
  modified_base 15..24: mod_base = OTHER; note = "2'-O-Methyl nucleoside"
  modified_base 26: mod_base = OTHER; note = "2'-O-Methyl nucleoside"
  modified_base 2..3: mod_base = OTHER; note = "phosphorothioate linked nucleoside"
  modified_base 23..24: mod_base = OTHER; note = "phosphorothioate linked nucleoside"
  source 1..26: mol_type = other RNA
tggacaaacgggcaacatacctttat

SEQ ID NO: 313 - RNA, 26 nt, synthetic construct
  misc_feature 1..26: note = HBV RNAi trigger antisense strand
  modified_base 25: mod_base = OTHER; note = "2'-hydroxy nucleoside"
  modified_base 2: mod_base = OTHER; note = "2'-deoxy-3'-fluoro nucleoside"
  modified_base 4: mod_base = OTHER; note = "2'-deoxy-3'-fluoro nucleoside"
  modified_base 6: mod_base = OTHER; note = "2'-deoxy-3'-fluoro nucleoside"
  modified_base 8: mod_base = OTHER; note = "2'-deoxy-3'-fluoro nucleoside"
  modified_base 10: mod_base = OTHER; note = "2'-deoxy-3'-fluoro nucleoside"
  modified_base 12: mod_base = OTHER; note = "2'-deoxy-3'-fluoro nucleoside"
  modified_base 14: mod_base = OTHER; note = "2'-deoxy-3'-fluoro nucleoside"
  modified_base 16: mod_base = OTHER; note = "2'-deoxy-3'-fluoro nucleoside"
  modified_base 18: mod_base = OTHER; note = "2'-deoxy-3'-fluoro nucleoside"
  modified_base 20: mod_base = OTHER; note = "2'-deoxy-3'-fluoro nucleoside"
  modified_base 1: mod_base = OTHER; note = "2'-O-Methyl nucleoside"
  modified_base 3: mod_base = OTHER; note = "2'-O-Methyl nucleoside"
  modified_base 5: mod_base = OTHER; note = "2'-O-Methyl nucleoside"
  modified_base 7: mod_base = OTHER; note = "2'-O-Methyl nucleoside"
  modified_base 9: mod_base = OTHER; note = "2'-O-Methyl nucleoside"
  modified_base 11: mod_base = OTHER; note = "2'-O-Methyl nucleoside"
  modified_base 13: mod_base = OTHER; note = "2'-O-Methyl nucleoside"
  modified_base 15: mod_base = OTHER; note = "2'-O-Methyl nucleoside"
  modified_base 17: mod_base = OTHER; note = "2'-O-Methyl nucleoside"
  modified_base 19: mod_base = OTHER; note = "2'-O-Methyl nucleoside"
  modified_base 21..24: mod_base = OTHER; note = "2'-O-Methyl nucleoside"
  modified_base 26: mod_base = OTHER; note = "2'-O-Methyl nucleoside"
  modified_base 2..3: mod_base = OTHER; note = "phosphorothioate linked nucleoside"
  modified_base 22..23: mod_base = OTHER; note = "phosphorothioate linked nucleoside"
  source 1..26: mol_type = other RNA
tatgataaaacgccgcagacacatat

SEQ ID NO: 314 - RNA, 26 nt, synthetic construct
  misc_feature 1..26: note = HBV RNAi trigger antisense strand
  modified_base 25: mod_base = OTHER; note = "2'-hydroxy nucleoside"
  modified_base 2: mod_base = OTHER; note = "2'-deoxy-3'-fluoro nucleoside"
  modified_base 8: mod_base = OTHER; note = "2'-deoxy-3'-fluoro nucleoside"
  modified_base 10: mod_base = OTHER; note = "2'-deoxy-3'-fluoro nucleoside"
  modified_base 14: mod_base = OTHER; note = "2'-deoxy-3'-fluoro nucleoside"
  modified_base 1: mod_base = OTHER; note = "2'-O-Methyl nucleoside"
  modified_base 3..6: mod_base = OTHER; note = "2'-O-Methyl nucleoside"
  modified_base 7: mod_base = OTHER; note = "2'-O-Methyl nucleoside"
  modified_base 9: mod_base = OTHER; note = "2'-O-Methyl nucleoside"
  modified_base 11..13: mod_base = OTHER; note = "2'-O-Methyl nucleoside"
  modified_base 15..24: mod_base = OTHER; note = "2'-O-Methyl nucleoside"
  modified_base 26: mod_base = OTHER; note = "2'-O-Methyl nucleoside"
  modified_base 2..3: mod_base = OTHER; note = "phosphorothioate linked nucleoside"
  modified_base 22..23: mod_base = OTHER; note = "phosphorothioate linked nucleoside"
  source 1..26: mol_type = other RNA
tatgataaaacgccgcagacacatat

SEQ ID NO: 315 - RNA, 26 nt, synthetic construct
  misc_feature 1..26: note = HBV RNAi trigger antisense strand
  modified_base 25: mod_base = OTHER; note = "2'-hydroxy nucleoside"
  modified_base 2: mod_base = OTHER; note = "2'-deoxy-3'-fluoro nucleoside"
  modified_base 4: mod_base = OTHER; note = "2'-deoxy-3'-fluoro nucleoside"
  modified_base 6: mod_base = OTHER; note = "2'-deoxy-3'-fluoro nucleoside"
  modified_base 8: mod_base = OTHER; note = "2'-deoxy-3'-fluoro nucleoside"
  modified_base 10: mod_base = OTHER; note = "2'-deoxy-3'-fluoro nucleoside"
  modified_base 12: mod_base = OTHER; note = "2'-deoxy-3'-fluoro nucleoside"
  modified_base 14: mod_base = OTHER; note = "2'-deoxy-3'-fluoro nucleoside"
  modified_base 16: mod_base = OTHER; note = "2'-deoxy-3'-fluoro nucleoside"
  modified_base 18: mod_base = OTHER; note = "2'-deoxy-3'-fluoro nucleoside"
  modified_base 20: mod_base = OTHER; note = "2'-deoxy-3'-fluoro nucleoside"
  modified_base 1: mod_base = OTHER; note = "2'-O-Methyl nucleoside"
  modified_base 3: mod_base = OTHER; note = "2'-O-Methyl nucleoside"
  modified_base 5: mod_base = OTHER; note = "2'-O-Methyl nucleoside"
  modified_base 7: mod_base = OTHER; note = "2'-O-Methyl nucleoside"
  modified_base 9: mod_base = OTHER; note = "2'-O-Methyl nucleoside"
  modified_base 11: mod_base = OTHER; note = "2'-O-Methyl nucleoside"
  modified_base 13: mod_base = OTHER; note = "2'-O-Methyl nucleoside"
  modified_base 15: mod_base = OTHER; note = "2'-O-Methyl nucleoside"
  modified_base 17: mod_base = OTHER; note = "2'-O-Methyl nucleoside"
  modified_base 19: mod_base = OTHER; note = "2'-O-Methyl nucleoside"
  modified_base 21..24: mod_base = OTHER; note = "2'-O-Methyl nucleoside"
  modified_base 26: mod_base = OTHER; note = "2'-O-Methyl nucleoside"
  modified_base 2..3: mod_base = OTHER; note = "phosphorothioate linked nucleoside"
  modified_base 22..23: mod_base = OTHER; note = "phosphorothioate linked nucleoside"
  source 1..26: mol_type = other RNA
tgataaaacgccgcagacacatctat

SEQ ID NO: 316 - RNA, 26 nt, synthetic construct
  misc_feature 1..26: note = HBV RNAi trigger antisense strand
  modified_base 25: mod_base = OTHER; note = "2'-hydroxy nucleoside"
  modified_base 2: mod_base = OTHER; note = "2'-deoxy-3'-fluoro nucleoside"
  modified_base 8: mod_base = OTHER; note = "2'-deoxy-3'-fluoro nucleoside"
  modified_base 10: mod_base = OTHER; note = "2'-deoxy-3'-fluoro nucleoside"
  modified_base 14: mod_base = OTHER; note = "2'-deoxy-3'-fluoro nucleoside"
  modified_base 1: mod_base = OTHER; note = "2'-O-Methyl nucleoside"
  modified_base 3..6: mod_base = OTHER; note = "2'-O-Methyl nucleoside"
  modified_base 7: mod_base = OTHER; note = "2'-O-Methyl nucleoside"
  modified_base 9: mod_base = OTHER; note = "2'-O-Methyl nucleoside"
  modified_base 11..13: mod_base = OTHER; note = "2'-O-Methyl nucleoside"
  modified_base 15..24: mod_base = OTHER; note = "2'-O-Methyl nucleoside"
  modified_base 26: mod_base = OTHER; note = "2'-O-Methyl nucleoside"
  modified_base 2..3: mod_base = OTHER; note = "phosphorothioate linked nucleoside"
  modified_base 22..23: mod_base = OTHER; note = "phosphorothioate linked nucleoside"
  source 1..26: mol_type = other RNA
tgataaaacgccgcagacacatctat

SEQ ID NO: 317 - RNA, 26 nt, synthetic construct
  misc_feature 1..26: note = HBV RNAi trigger antisense strand
  modified_base 25: mod_base = OTHER; note = "2'-hydroxy nucleoside"
  modified_base 2: mod_base = OTHER; note = "2'-deoxy-3'-fluoro nucleoside"
  modified_base 4: mod_base = OTHER; note = "2'-deoxy-3'-fluoro nucleoside"
  modified_base 6: mod_base = OTHER; note = "2'-deoxy-3'-fluoro nucleoside"
  modified_base 8: mod_base = OTHER; note = "2'-deoxy-3'-fluoro nucleoside"
  modified_base 10: mod_base = OTHER; note = "2'-deoxy-3'-fluoro nucleoside"
  modified_base 12: mod_base = OTHER; note = "2'-deoxy-3'-fluoro nucleoside"
  modified_base 14: mod_base = OTHER; note = "2'-deoxy-3'-fluoro nucleoside"
  modified_base 16: mod_base = OTHER; note = "2'-deoxy-3'-fluoro nucleoside"
  modified_base 18: mod_base = OTHER; note = "2'-deoxy-3'-fluoro nucleoside"
  modified_base 20: mod_base = OTHER; note = "2'-deoxy-3'-fluoro nucleoside"
  modified_base 1: mod_base = OTHER; note = "2'-O-Methyl nucleoside"
  modified_base 3: mod_base = OTHER; note = "2'-O-Methyl nucleoside"
  modified_base 5: mod_base = OTHER; note = "2'-O-Methyl nucleoside"
  modified_base 7: mod_base = OTHER; note = "2'-O-Methyl nucleoside"
  modified_base 9: mod_base = OTHER; note = "2'-O-Methyl nucleoside"
  modified_base 11: mod_base = OTHER; note = "2'-O-Methyl nucleoside"
  modified_base 13: mod_base = OTHER; note = "2'-O-Methyl nucleoside"
  modified_base 15: mod_base = OTHER; note = "2'-O-Methyl nucleoside"
  modified_base 17: mod_base = OTHER; note = "2'-O-Methyl nucleoside"
  modified_base 19: mod_base = OTHER; note = "2'-O-Methyl nucleoside"
  modified_base 21..24: mod_base = OTHER; note = "2'-O-Methyl nucleoside"
  modified_base 26: mod_base = OTHER; note = "2'-O-Methyl nucleoside"
  modified_base 2..3: mod_base = OTHER; note = "phosphorothioate linked nucleoside"
  modified_base 23..24: mod_base = OTHER; note = "phosphorothioate linked nucleoside"
  modified_base 1: mod_base = OTHER; note = "vinyl phophonate modified nucleoside"
  source 1..26: mol_type = other RNA
tggacaaacgggcaacatacctttat

SEQ ID NO: 318 - RNA, 26 nt, synthetic construct
  misc_feature 1..26: note = HBV RNAi trigger antisense strand
  modified_base 25: mod_base = OTHER; note = "2'-hydroxy nucleoside"
  modified_base 2: mod_base = OTHER; note = "2'-deoxy-3'-fluoro nucleoside"
  modified_base 4: mod_base = OTHER; note = "2'-deoxy-3'-fluoro nucleoside"
  modified_base 6: mod_base = OTHER; note = "2'-deoxy-3'-fluoro nucleoside"
  modified_base 8: mod_base = OTHER; note = "2'-deoxy-3'-fluoro nucleoside"
  modified_base 10: mod_base = OTHER; note = "2'-deoxy-3'-fluoro nucleoside"
  modified_base 12: mod_base = OTHER; note = "2'-deoxy-3'-fluoro nucleoside"
  modified_base 14: mod_base = OTHER; note = "2'-deoxy-3'-fluoro nucleoside"
  modified_base 16: mod_base = OTHER; note = "2'-deoxy-3'-fluoro nucleoside"
  modified_base 18: mod_base = OTHER; note = "2'-deoxy-3'-fluoro nucleoside"
  modified_base 20: mod_base = OTHER; note = "2'-deoxy-3'-fluoro nucleoside"
  modified_base 1: mod_base = OTHER; note = "2'-O-Methyl nucleoside"
  modified_base 3: mod_base = OTHER; note = "2'-O-Methyl nucleoside"
  modified_base 5: mod_base = OTHER; note = "2'-O-Methyl nucleoside"
  modified_base 7: mod_base = OTHER; note = "2'-O-Methyl nucleoside"
  modified_base 9: mod_base = OTHER; note = "2'-O-Methyl nucleoside"
  modified_base 11: mod_base = OTHER; note = "2'-O-Methyl nucleoside"
  modified_base 13: mod_base = OTHER; note = "2'-O-Methyl nucleoside"
  modified_base 15: mod_base = OTHER; note = "2'-O-Methyl nucleoside"
  modified_base 17: mod_base = OTHER; note = "2'-O-Methyl nucleoside"
  modified_base 19: mod_base = OTHER; note = "2'-O-Methyl nucleoside"
  modified_base 21..24: mod_base = OTHER; note = "2'-O-Methyl nucleoside"
  modified_base 26: mod_base = OTHER; note = "2'-O-Methyl nucleoside"
  modified_base 2..3: mod_base = OTHER; note = "phosphorothioate linked nucleoside"
  modified_base 23..24: mod_base = OTHER; note = "phosphorothioate linked nucleoside"
  modified_base 1: mod_base = OTHER; note = "vinyl phophonate modified nucleoside"
  source 1..26: mol_type = other RNA
taccaatttatgcctacaggccttat

SEQ ID NO: 319 - RNA, 21 nt, synthetic construct
  modified_base 1: mod_base = OTHER; note = thymine
  modified_base 20..21: mod_base = OTHER; note = thymine
  misc_feature 1..21: note = HBV RNAi trigger antisense strand
  modified_base 2: mod_base = OTHER; note = "2'-deoxy-3'-fluoro nucleoside"
  modified_base 4: mod_base = OTHER; note = "2'-deoxy-3'-fluoro nucleoside"
  modified_base 6: mod_base = OTHER; note = "2'-deoxy-3'-fluoro nucleoside"
  modified_base 8: mod_base = OTHER; note = "2'-deoxy-3'-fluoro nucleoside"
  modified_base 10: mod_base = OTHER; note = "2'-deoxy-3'-fluoro nucleoside"
  modified_base 12: mod_base = OTHER; note = "2'-deoxy-3'-fluoro nucleoside"
  modified_base 14: mod_base = OTHER; note = "2'-deoxy-3'-fluoro nucleoside"
  modified_base 16: mod_base = OTHER; note = "2'-deoxy-3'-fluoro nucleoside"
  modified_base 18: mod_base = OTHER; note = "2'-deoxy-3'-fluoro nucleoside"
  modified_base 3: mod_base = OTHER; note = "2'-O-Methyl nucleoside"
  modified_base 5: mod_base = OTHER; note = "2'-O-Methyl nucleoside"
  modified_base 7: mod_base = OTHER; note = "2'-O-Methyl nucleoside"
  modified_base 9: mod_base = OTHER; note = "2'-O-Methyl nucleoside"
  modified_base 11: mod_base = OTHER; note = "2'-O-Methyl nucleoside"
  modified_base 13: mod_base = OTHER; note = "2'-O-Methyl nucleoside"
  modified_base 15: mod_base = OTHER; note = "2'-O-Methyl nucleoside"
  modified_base 17: mod_base = OTHER; note = "2'-O-Methyl nucleoside"
  modified_base 19: mod_base = OTHER; note = "2'-O-Methyl nucleoside"
  modified_base 21: mod_base = OTHER; note = "phosphorothioate linked nucleoside"
  modified_base 21: mod_base = OTHER; note = "phosphate modified nucleoside"
  modified_base 1: mod_base = OTHER; note = thymine
  modified_base 20: mod_base = OTHER; note = thymine
  modified_base 21: mod_base = OTHER; note = thymine
  source 1..21: mol_type = other RNA
taccaatttatgcctacagtt

SEQ ID NO: 320 - RNA, 26 nt, synthetic construct
  misc_feature 1..26: note = HBV RNAi trigger antisense strand
  modified_base 2: mod_base = OTHER; note = "2'-deoxy-3'-fluoro nucleoside"
  modified_base 4: mod_base = OTHER; note = "2'-deoxy-3'-fluoro nucleoside"
  modified_base 6: mod_base = OTHER; note = "2'-deoxy-3'-fluoro nucleoside"
  modified_base 8: mod_base = OTHER; note = "2'-deoxy-3'-fluoro nucleoside"
  modified_base 10: mod_base = OTHER; note = "2'-deoxy-3'-fluoro nucleoside"
  modified_base 12: mod_base = OTHER; note = "2'-deoxy-3'-fluoro nucleoside"
  modified_base 14: mod_base = OTHER; note = "2'-deoxy-3'-fluoro nucleoside"
  modified_base 16: mod_base = OTHER; note = "2'-deoxy-3'-fluoro nucleoside"
  modified_base 18: mod_base = OTHER; note = "2'-deoxy-3'-fluoro nucleoside"
  modified_base 20: mod_base = OTHER; note = "2'-deoxy-3'-fluoro nucleoside"
  modified_base 22: mod_base = OTHER; note = "2'-deoxy-3'-fluoro nucleoside"
  modified_base 1: mod_base = OTHER; note = "2'-O-Methyl nucleoside"
  modified_base 3: mod_base = OTHER; note = "2'-O-Methyl nucleoside"
  modified_base 5: mod_base = OTHER; note = "2'-O-Methyl nucleoside"
  modified_base 7: mod_base = OTHER; note = "2'-O-Methyl nucleoside"
  modified_base 9: mod_base = OTHER; note = "2'-O-Methyl nucleoside"
  modified_base 11: mod_base = OTHER; note = "2'-O-Methyl nucleoside"
  modified_base 13: mod_base = OTHER; note = "2'-O-Methyl nucleoside"
  modified_base 15: mod_base = OTHER; note = "2'-O-Methyl nucleoside"
  modified_base 17: mod_base = OTHER; note = "2'-O-Methyl nucleoside"
  modified_base 19: mod_base = OTHER; note = "2'-O-Methyl nucleoside"
  modified_base 21: mod_base = OTHER; note = "2'-O-Methyl nucleoside"
  modified_base 23..26: mod_base = OTHER; note = "2'-O-Methyl nucleoside"
  modified_base 2..3: mod_base = OTHER; note = "phosphorothioate linked nucleoside"
  modified_base 23..24: mod_base = OTHER; note = "phosphorothioate linked nucleoside"
  source 1..26: mol_type = other RNA
agtccgcgggattcagcgccgactat

SEQ ID NO: 321 - RNA, 26 nt, synthetic construct
  misc_feature 1..26: note = HBV RNAi trigger antisense strand
  modified_base 2: mod_base = OTHER; note = "2'-deoxy-3'-fluoro nucleoside"
  modified_base 4: mod_base = OTHER; note = "2'-deoxy-3'-fluoro nucleoside"
  modified_base 6: mod_base = OTHER; note = "2'-deoxy-3'-fluoro nucleoside"
  modified_base 8: mod_base = OTHER; note = "2'-deoxy-3'-fluoro nucleoside"
  modified_base 10: mod_base = OTHER; note = "2'-deoxy-3'-fluoro nucleoside"
  modified_base 12: mod_base = OTHER; note = "2'-deoxy-3'-fluoro nucleoside"
  modified_base 14: mod_base = OTHER; note = "2'-deoxy-3'-fluoro nucleoside"
  modified_base 16: mod_base = OTHER; note = "2'-deoxy-3'-fluoro nucleoside"
  modified_base 18: mod_base = OTHER; note = "2'-deoxy-3'-fluoro nucleoside"
  modified_base 20: mod_base = OTHER; note = "2'-deoxy-3'-fluoro nucleoside"
  modified_base 22: mod_base = OTHER; note = "2'-deoxy-3'-fluoro nucleoside"
  modified_base 1: mod_base = OTHER; note = "2'-O-Methyl nucleoside"
  modified_base 3: mod_base = OTHER; note = "2'-O-Methyl nucleoside"
  modified_base 5: mod_base = OTHER; note = "2'-O-Methyl nucleoside"
  modified_base 7: mod_base = OTHER; note = "2'-O-Methyl nucleoside"
  modified_base 9: mod_base = OTHER; note = "2'-O-Methyl nucleoside"
  modified_base 11: mod_base = OTHER; note = "2'-O-Methyl nucleoside"
  modified_base 13: mod_base = OTHER; note = "2'-O-Methyl nucleoside"
  modified_base 15: mod_base = OTHER; note = "2'-O-Methyl nucleoside"
  modified_base 17: mod_base = OTHER; note = "2'-O-Methyl nucleoside"
  modified_base 19: mod_base = OTHER; note = "2'-O-Methyl nucleoside"
  modified_base 21: mod_base = OTHER; note = "2'-O-Methyl nucleoside"
  modified_base 23..26: mod_base = OTHER; note = "2'-O-Methyl nucleoside"
  modified_base 2..3: mod_base = OTHER; note = "phosphorothioate linked nucleoside"
  modified_base 23..24: mod_base = OTHER; note = "phosphorothioate linked nucleoside"
  source 1..26: mol_type = other RNA
ttaaagagaggtgcgcccggtggtat

SEQ ID NO: 322 - RNA, 26 nt, synthetic construct
  misc_feature 1..26: note = HBV RNAi trigger antisense strand
  modified_base 2: mod_base = OTHER; note = "2'-deoxy-3'-fluoro nucleoside"
  modified_base 4: mod_base = OTHER; note = "2'-deoxy-3'-fluoro nucleoside"
  modified_base 6: mod_base = OTHER; note = "2'-deoxy-3'-fluoro nucleoside"
  modified_base 8: mod_base = OTHER; note = "2'-deoxy-3'-fluoro nucleoside"
  modified_base 10: mod_base = OTHER; note = "2'-deoxy-3'-fluoro nucleoside"
  modified_base 12: mod_base = OTHER; note = "2'-deoxy-3'-fluoro nucleoside"
  modified_base 14: mod_base = OTHER; note = "2'-deoxy-3'-fluoro nucleoside"
  modified_base 16: mod_base = OTHER; note = "2'-deoxy-3'-fluoro nucleoside"
  modified_base 18: mod_base = OTHER; note = "2'-deoxy-3'-fluoro nucleoside"
  modified_base 20: mod_base = OTHER; note = "2'-deoxy-3'-fluoro nucleoside"
  modified_base 22: mod_base = OTHER; note = "2'-deoxy-3'-fluoro nucleoside"
  modified_base 1: mod_base = OTHER; note = "2'-O-Methyl nucleoside"
  modified_base 3: mod_base = OTHER; note = "2'-O-Methyl nucleoside"
  modified_base 5: mod_base = OTHER; note = "2'-O-Methyl nucleoside"
  modified_base 7: mod_base = OTHER; note = "2'-O-Methyl nucleoside"
  modified_base 9: mod_base = OTHER; note = "2'-O-Methyl nucleoside"
  modified_base 11: mod_base = OTHER; note = "2'-O-Methyl nucleoside"
  modified_base 13: mod_base = OTHER; note = "2'-O-Methyl nucleoside"
  modified_base 15: mod_base = OTHER; note = "2'-O-Methyl nucleoside"
  modified_base 17: mod_base = OTHER; note = "2'-O-Methyl nucleoside"
  modified_base 19: mod_base = OTHER; note = "2'-O-Methyl nucleoside"
  modified_base 21: mod_base = OTHER; note = "2'-O-Methyl nucleoside"
  modified_base 23..26: mod_base = OTHER; note = "2'-O-Methyl nucleoside"
  modified_base 2..3: mod_base = OTHER; note = "phosphorothioate linked nucleoside"
  modified_base 23..24: mod_base = OTHER; note = "phosphorothioate linked nucleoside"
  source 1..26: mol_type = other RNA
taagcgaagtgcacacggtccggtat

SEQ ID NO: 323 - RNA, 26 nt, synthetic construct
  misc_feature 1..26: note = HBV RNAi trigger antisense strand
  modified_base 2: mod_base = OTHER; note = "2'-deoxy-3'-fluoro nucleoside"
  modified_base 4: mod_base = OTHER; note = "2'-deoxy-3'-fluoro nucleoside"
  modified_base 6: mod_base = OTHER; note = "2'-deoxy-3'-fluoro nucleoside"
  modified_base 8: mod_base = OTHER; note = "2'-deoxy-3'-fluoro nucleoside"
  modified_base 10: mod_base = OTHER; note = "2'-deoxy-3'-fluoro nucleoside"
  modified_base 12: mod_base = OTHER; note = "2'-deoxy-3'-fluoro nucleoside"
  modified_base 14: mod_base = OTHER; note = "2'-deoxy-3'-fluoro nucleoside"
  modified_base 16: mod_base = OTHER; note = "2'-deoxy-3'-fluoro nucleoside"
  modified_base 18: mod_base = OTHER; note = "2'-deoxy-3'-fluoro nucleoside"
  modified_base 20: mod_base = OTHER; note = "2'-deoxy-3'-fluoro nucleoside"
  modified_base 22: mod_base = OTHER; note = "2'-deoxy-3'-fluoro nucleoside"
  modified_base 1: mod_base = OTHER; note = "2'-O-Methyl nucleoside"
  modified_base 3: mod_base = OTHER; note = "2'-O-Methyl nucleoside"
  modified_base 5: mod_base = OTHER; note = "2'-O-Methyl nucleoside"
  modified_base 7: mod_base = OTHER; note = "2'-O-Methyl nucleoside"
  modified_base 9: mod_base = OTHER; note = "2'-O-Methyl nucleoside"
  modified_base 11: mod_base = OTHER; note = "2'-O-Methyl nucleoside"
  modified_base 13: mod_base = OTHER; note = "2'-O-Methyl nucleoside"
  modified_base 15: mod_base = OTHER; note = "2'-O-Methyl nucleoside"
  modified_base 17: mod_base = OTHER; note = "2'-O-Methyl nucleoside"
  modified_base 19: mod_base = OTHER; note = "2'-O-Methyl nucleoside"
  modified_base 21: mod_base = OTHER; note = "2'-O-Methyl nucleoside"
  modified_base 23..26: mod_base = OTHER; note = "2'-O-Methyl nucleoside"
  modified_base 2..3: mod_base = OTHER; note = "phosphorothioate linked nucleoside"
  modified_base 23..24: mod_base = OTHER; note = "phosphorothioate linked nucleoside"
  source 1..26: mol_type = other RNA
ttgaagcgaagtgcacacggacctat

SEQ ID NO: 324 - RNA, 26 nt, synthetic construct
  misc_feature 1..26: note = HBV RNAi trigger antisense strand
  modified_base 2: mod_base = OTHER; note = "2'-deoxy-3'-fluoro nucleoside"
  modified_base 4: mod_base = OTHER; note = "2'-deoxy-3'-fluoro nucleoside"
  modified_base 6: mod_base = OTHER; note = "2'-deoxy-3'-fluoro nucleoside"
  modified_base 8: mod_base = OTHER; note = "2'-deoxy-3'-fluoro nucleoside"
  modified_base 10: mod_base = OTHER; note = "2'-deoxy-3'-fluoro nucleoside"
  modified_base 12: mod_base = OTHER; note = "2'-deoxy-3'-fluoro nucleoside"
  modified_base 14: mod_base = OTHER; note = "2'-deoxy-3'-fluoro nucleoside"
  modified_base 16: mod_base = OTHER; note = "2'-deoxy-3'-fluoro nucleoside"
  modified_base 18: mod_base = OTHER; note = "2'-deoxy-3'-fluoro nucleoside"
  modified_base 20: mod_base = OTHER; note = "2'-deoxy-3'-fluoro nucleoside"
  modified_base 22: mod_base = OTHER; note = "2'-deoxy-3'-fluoro nucleoside"
  modified_base 1: mod_base = OTHER; note = "2'-O-Methyl nucleoside"
  modified_base 3: mod_base = OTHER; note = "2'-O-Methyl nucleoside"
  modified_base 5: mod_base = OTHER; note = "2'-O-Methyl nucleoside"
  modified_base 7: mod_base = OTHER; note = "2'-O-Methyl nucleoside"
  modified_base 9: mod_base = OTHER; note = "2'-O-Methyl nucleoside"
  modified_base 11: mod_base = OTHER; note = "2'-O-Methyl nucleoside"
  modified_base 13: mod_base = OTHER; note = "2'-O-Methyl nucleoside"
  modified_base 15: mod_base = OTHER; note = "2'-O-Methyl nucleoside"
  modified_base 17: mod_base = OTHER; note = "2'-O-Methyl nucleoside"
  modified_base 19: mod_base = OTHER; note = "2'-O-Methyl nucleoside"
  modified_base 21: mod_base = OTHER; note = "2'-O-Methyl nucleoside"
  modified_base 23..26: mod_base = OTHER; note = "2'-O-Methyl nucleoside"
  modified_base 2..3: mod_base = OTHER; note = "phosphorothioate linked nucleoside"
  modified_base 23..24: mod_base = OTHER; note = "phosphorothioate linked nucleoside"
  source 1..26: mol_type = other RNA
agtgaagcgaagtgcacacggactat

SEQ ID NO: 325 - RNA, 26 nt, synthetic construct
  misc_feature 1..26: note = HBV RNAi trigger antisense strand
  modified_base 2: mod_base = OTHER; note = "2'-deoxy-3'-fluoro nucleoside"
  modified_base 4: mod_base = OTHER; note = "2'-deoxy-3'-fluoro nucleoside"
  modified_base 6: mod_base = OTHER; note = "2'-deoxy-3'-fluoro nucleoside"
  modified_base 8: mod_base = OTHER; note = "2'-deoxy-3'-fluoro nucleoside"
  modified_base 10: mod_base = OTHER; note = "2'-deoxy-3'-fluoro nucleoside"
  modified_base 12: mod_base = OTHER; note = "2'-deoxy-3'-fluoro nucleoside"
  modified_base 14: mod_base = OTHER; note = "2'-deoxy-3'-fluoro nucleoside"
  modified_base 16: mod_base = OTHER; note = "2'-deoxy-3'-fluoro nucleoside"
  modified_base 18: mod_base = OTHER; note = "2'-deoxy-3'-fluoro nucleoside"
  modified_base 20: mod_base = OTHER; note = "2'-deoxy-3'-fluoro nucleoside"
  modified_base 22: mod_base = OTHER; note = "2'-deoxy-3'-fluoro nucleoside"
  modified_base 1: mod_base = OTHER; note = "2'-O-Methyl nucleoside"
  modified_base 3: mod_base = OTHER; note = "2'-O-Methyl nucleoside"
  modified_base 5: mod_base = OTHER; note = "2'-O-Methyl nucleoside"
  modified_base 7: mod_base = OTHER; note = "2'-O-Methyl nucleoside"
  modified_base 9: mod_base = OTHER; note = "2'-O-Methyl nucleoside"
  modified_base 11: mod_base = OTHER; note = "2'-O-Methyl nucleoside"
  modified_base 13: mod_base = OTHER; note = "2'-O-Methyl nucleoside"
  modified_base 15: mod_base = OTHER; note = "2'-O-Methyl nucleoside"
  modified_base 17: mod_base = OTHER; note = "2'-O-Methyl nucleoside"
  modified_base 19: mod_base = OTHER; note = "2'-O-Methyl nucleoside"
  modified_base 21: mod_base = OTHER; note = "2'-O-Methyl nucleoside"
  modified_base 23..26: mod_base = OTHER; note = "2'-O-Methyl nucleoside"
  modified_base 2..3: mod_base = OTHER; note = "phosphorothioate linked nucleoside"
  modified_base 23..24: mod_base = OTHER; note = "phosphorothioate linked nucleoside"
  source 1..26: mol_type = other RNA
tagaggtgaagcgaagtgcacactat

SEQ ID NO: 326 - RNA, 26 nt, synthetic construct
  misc_feature 1..26: note = HBV RNAi trigger antisense strand
  modified_base 2: mod_base = OTHER; note = "2'-deoxy-3'-fluoro nucleoside"
  modified_base 4: mod_base = OTHER; note = "2'-deoxy-3'-fluoro nucleoside"
  modified_base 6: mod_base = OTHER; note = "2'-deoxy-3'-fluoro nucleoside"
  modified_base 8: mod_base = OTHER; note = "2'-deoxy-3'-fluoro nucleoside"
  modified_base 10: mod_base = OTHER; note = "2'-deoxy-3'-fluoro nucleoside"
  modified_base 12: mod_base = OTHER; note = "2'-deoxy-3'-fluoro nucleoside"
  modified_base 14: mod_base = OTHER; note = "2'-deoxy-3'-fluoro nucleoside"
  modified_base 16: mod_base = OTHER; note = "2'-deoxy-3'-fluoro nucleoside"
  modified_base 18: mod_base = OTHER; note = "2'-deoxy-3'-fluoro nucleoside"
  modified_base 20: mod_base = OTHER; note = "2'-deoxy-3'-fluoro nucleoside"
  modified_base 22: mod_base = OTHER; note = "2'-deoxy-3'-fluoro nucleoside"
  modified_base 1: mod_base = OTHER; note = "2'-O-Methyl nucleoside"
  modified_base 3: mod_base = OTHER; note = "2'-O-Methyl nucleoside"
  modified_base 5: mod_base = OTHER; note = "2'-O-Methyl nucleoside"
  modified_base 7: mod_base = OTHER; note = "2'-O-Methyl nucleoside"
  modified_base 9: mod_base = OTHER; note = "2'-O-Methyl nucleoside"
  modified_base 11: mod_base = OTHER; note = "2'-O-Methyl nucleoside"
  modified_base 13: mod_base = OTHER; note = "2'-O-Methyl nucleoside"
  modified_base 15: mod_base = OTHER; note = "2'-O-Methyl nucleoside"
  modified_base 17: mod_base = OTHER; note = "2'-O-Methyl nucleoside"
  modified_base 19: mod_base = OTHER; note = "2'-O-Methyl nucleoside"
  modified_base 21: mod_base = OTHER; note = "2'-O-Methyl nucleoside"
  modified_base 23..26: mod_base = OTHER; note = "2'-O-Methyl nucleoside"
  modified_base 2..3: mod_base = OTHER; note = "phosphorothioate linked nucleoside"
  modified_base 23..24: mod_base = OTHER; note = "phosphorothioate linked nucleoside"
  source 1..26: mol_type = other RNA
tcagaggtgaagcgaagtgcacatat

SEQ ID NO: 327 - RNA, 26 nt, synthetic construct
  misc_feature 1..26: note = HBV RNAi trigger antisense strand
  modified_base 2: mod_base = OTHER; note = "2'-deoxy-3'-fluoro nucleoside"
  modified_base 4: mod_base = OTHER; note = "2'-deoxy-3'-fluoro nucleoside"
  modified_base 6: mod_base = OTHER; note = "2'-deoxy-3'-fluoro nucleoside"
  modified_base 8: mod_base = OTHER; note = "2'-deoxy-3'-fluoro nucleoside"
  modified_base 10: mod_base = OTHER; note = "2'-deoxy-3'-fluoro nucleoside"
  modified_base 12: mod_base = OTHER; note = "2'-deoxy-3'-fluoro nucleoside"
  modified_base 14: mod_base = OTHER; note = "2'-deoxy-3'-fluoro nucleoside"
  modified_base 16: mod_base = OTHER; note = "2'-deoxy-3'-fluoro nucleoside"
  modified_base 18: mod_base = OTHER; note = "2'-deoxy-3'-fluoro nucleoside"
  modified_base 20: mod_base = OTHER; note = "2'-deoxy-3'-fluoro nucleoside"
  modified_base 22: mod_base = OTHER; note = "2'-deoxy-3'-fluoro nucleoside"
  modified_base 1: mod_base = OTHER; note = "2'-O-Methyl nucleoside"
  modified_base 3: mod_base = OTHER; note = "2'-O-Methyl nucleoside"
  modified_base 5: mod_base = OTHER; note = "2'-O-Methyl nucleoside"
  modified_base 7: mod_base = OTHER; note = "2'-O-Methyl nucleoside"
  modified_base 9: mod_base = OTHER; note = "2'-O-Methyl nucleoside"
  modified_base 11: mod_base = OTHER; note = "2'-O-Methyl nucleoside"
  modified_base 13: mod_base = OTHER; note = "2'-O-Methyl nucleoside"
  modified_base 15: mod_base = OTHER; note = "2'-O-Methyl nucleoside"
  modified_base 17: mod_base = OTHER; note = "2'-O-Methyl nucleoside"
  modified_base 19: mod_base = OTHER; note = "2'-O-Methyl nucleoside"
  modified_base 21: mod_base = OTHER; note = "2'-O-Methyl nucleoside"
  modified_base 23..26: mod_base = OTHER; note = "2'-O-Methyl nucleoside"
  modified_base 2..3: mod_base = OTHER; note = "phosphorothioate linked nucleoside"
  modified_base 23..24: mod_base = OTHER; note = "phosphorothioate linked nucleoside"
  source 1..26: mol_type = other RNA
tgcagaggtgaagcgaagtgcactat

SEQ ID NO: 328 - RNA, 26 nt, synthetic construct
  misc_feature 1..26: note = HBV RNAi trigger antisense strand
  modified_base 2: mod_base = OTHER; note = "2'-deoxy-3'-fluoro nucleoside"
  modified_base 4: mod_base = OTHER; note = "2'-deoxy-3'-fluoro nucleoside"
  modified_base 6: mod_base = OTHER; note = "2'-deoxy-3'-fluoro nucleoside"
  modified_base 8: mod_base = OTHER; note = "2'-deoxy-3'-fluoro nucleoside"
  modified_base 10: mod_base = OTHER; note = "2'-deoxy-3'-fluoro nucleoside"
  modified_base 12: mod_base = OTHER; note = "2'-deoxy-3'-fluoro nucleoside"
  modified_base 14: mod_base = OTHER; note = "2'-deoxy-3'-fluoro nucleoside"
  modified_base 16: mod_base = OTHER; note = "2'-deoxy-3'-fluoro nucleoside"
  modified_base 18: mod_base = OTHER; note = "2'-deoxy-3'-fluoro nucleoside"
  modified_base 20: mod_base = OTHER; note = "2'-deoxy-3'-fluoro nucleoside"
  modified_base 22: mod_base = OTHER; note = "2'-deoxy-3'-fluoro nucleoside"
  modified_base 1: mod_base = OTHER; note = "2'-O-Methyl nucleoside"
  modified_base 3: mod_base = OTHER; note = "2'-O-Methyl nucleoside"
  modified_base 5: mod_base = OTHER; note = "2'-O-Methyl nucleoside"
  modified_base 7: mod_base = OTHER; note = "2'-O-Methyl nucleoside"
  modified_base 9: mod_base = OTHER; note = "2'-O-Methyl nucleoside"
  modified_base 11: mod_base = OTHER; note = "2'-O-Methyl nucleoside"
  modified_base 13: mod_base = OTHER; note = "2'-O-Methyl nucleoside"
  modified_base 15: mod_base = OTHER; note = "2'-O-Methyl nucleoside"
  modified_base 17: mod_base = OTHER; note = "2'-O-Methyl nucleoside"
  modified_base 19: mod_base = OTHER; note = "2'-O-Methyl nucleoside"
  modified_base 21: mod_base = OTHER; note = "2'-O-Methyl nucleoside"
  modified_base 23..26: mod_base = OTHER; note = "2'-O-Methyl nucleoside"
  modified_base 2..3: mod_base = OTHER; note = "phosphorothioate linked nucleoside"
  modified_base 23..24: mod_base = OTHER; note = "phosphorothioate linked nucleoside"
  source 1..26: mol_type = other RNA
tcggtcgttgacattgctgggagtat

SEQ ID NO: 329 - RNA, 26 nt, synthetic construct
  misc_feature 1..26: note = HBV RNAi trigger antisense strand
  modified_base 2: mod_base = OTHER; note = "2'-deoxy-3'-fluoro nucleoside"
  modified_base 4: mod_base = OTHER; note = "2'-deoxy-3'-fluoro nucleoside"
  modified_base 6: mod_base = OTHER; note = "2'-deoxy-3'-fluoro nucleoside"
  modified_base 8: mod_base = OTHER; note = "2'-deoxy-3'-fluoro nucleoside"
  modified_base 10: mod_base = OTHER; note = "2'-deoxy-3'-fluoro nucleoside"
  modified_base 12: mod_base = OTHER; note = "2'-deoxy-3'-fluoro nucleoside"
  modified_base 14: mod_base = OTHER; note = "2'-deoxy-3'-fluoro nucleoside"
  modified_base 16: mod_base = OTHER; note = "2'-deoxy-3'-fluoro nucleoside"
  modified_base 18: mod_base = OTHER; note = "2'-deoxy-3'-fluoro nucleoside"
  modified_base 20: mod_base = OTHER; note = "2'-deoxy-3'-fluoro nucleoside"
  modified_base 22: mod_base = OTHER; note = "2'-deoxy-3'-fluoro nucleoside"
  modified_base 1: mod_base = OTHER; note = "2'-O-Methyl nucleoside"
  modified_base 3: mod_base = OTHER; note = "2'-O-Methyl nucleoside"
  modified_base 5: mod_base = OTHER; note = "2'-O-Methyl nucleoside"
  modified_base 7: mod_base = OTHER; note = "2'-O-Methyl nucleoside"
  modified_base 9: mod_base = OTHER; note = "2'-O-Methyl nucleoside"
  modified_base 11: mod_base = OTHER; note = "2'-O-Methyl nucleoside"
  modified_base 13: mod_base = OTHER; note = "2'-O-Methyl nucleoside"
  modified_base 15: mod_base = OTHER; note = "2'-O-Methyl nucleoside"
  modified_base 17: mod_base = OTHER; note = "2'-O-Methyl nucleoside"
  modified_base 19: mod_base = OTHER; note = "2'-O-Methyl nucleoside"
  modified_base 21: mod_base = OTHER; note = "2'-O-Methyl nucleoside"
  modified_base 23..26: mod_base = OTHER; note = "2'-O-Methyl nucleoside"
  modified_base 2..3: mod_base = OTHER; note = "phosphorothioate linked nucleoside"
  modified_base 23..24: mod_base = OTHER; note = "phosphorothioate linked nucleoside"
  source 1..26: mol_type = other RNA
tcaaggtcggtcgttgacattgctat

SEQ ID NO: 330 - RNA, 26 nt, synthetic construct
  misc_feature 1..26: note = HBV RNAi trigger antisense strand
  modified_base 2: mod_base = OTHER; note = "2'-deoxy-3'-fluoro nucleoside"
  modified_base 4: mod_base = OTHER; note = "2'-deoxy-3'-fluoro nucleoside"
  modified_base 6: mod_base = OTHER; note = "2'-deoxy-3'-fluoro nucleoside"
  modified_base 8: mod_base = OTHER; note = "2'-deoxy-3'-fluoro nucleoside"
  modified_base 10: mod_base = OTHER; note = "2'-deoxy-3'-fluoro nucleoside"
  modified_base 12: mod_base = OTHER; note = "2'-deoxy-3'-fluoro nucleoside"
  modified_base 14: mod_base = OTHER; note = "2'-deoxy-3'-fluoro nucleoside"
  modified_base 16: mod_base = OTHER; note = "2'-deoxy-3'-fluoro nucleoside"
  modified_base 18: mod_base = OTHER; note = "2'-deoxy-3'-fluoro nucleoside"
  modified_base 20: mod_base = OTHER; note = "2'-deoxy-3'-fluoro nucleoside"
  modified_base 22: mod_base = OTHER; note = "2'-deoxy-3'-fluoro nucleoside"
  modified_base 1: mod_base = OTHER; note = "2'-O-Methyl nucleoside"
  modified_base 3: mod_base = OTHER; note = "2'-O-Methyl nucleoside"
  modified_base 5: mod_base = OTHER; note = "2'-O-Methyl nucleoside"
  modified_base 7: mod_base = OTHER; note = "2'-O-Methyl nucleoside"
  modified_base 9: mod_base = OTHER; note = "2'-O-Methyl nucleoside"
  modified_base 11: mod_base = OTHER; note = "2'-O-Methyl nucleoside"
  modified_base 13: mod_base = OTHER; note = "2'-O-Methyl nucleoside"
  modified_base 15: mod_base = OTHER; note = "2'-O-Methyl nucleoside"
  modified_base 17: mod_base = OTHER; note = "2'-O-Methyl nucleoside"
  modified_base 19: mod_base = OTHER; note = "2'-O-Methyl nucleoside"
  modified_base 21: mod_base = OTHER; note = "2'-O-Methyl nucleoside"
  modified_base 23..26: mod_base = OTHER; note = "2'-O-Methyl nucleoside"
  modified_base 2..3: mod_base = OTHER; note = "phosphorothioate linked nucleoside"
  modified_base 23..24: mod_base = OTHER; note = "phosphorothioate linked nucleoside"
  source 1..26: mol_type = other RNA
tgacctttaacctaatctcctcctat

SEQ ID NO: 331 - RNA, 26 nt, synthetic construct
  misc_feature 1..26: note = HBV RNAi trigger antisense strand
  modified_base 2: mod_base = OTHER; note = "2'-deoxy-3'-fluoro nucleoside"
  modified_base 4: mod_base = OTHER; note = "2'-deoxy-3'-fluoro nucleoside"
  modified_base 6: mod_base = OTHER; note = "2'-deoxy-3'-fluoro nucleoside"
  modified_base 8: mod_base = OTHER; note = "2'-deoxy-3'-fluoro nucleoside"
  modified_base 10: mod_base = OTHER; note = "2'-deoxy-3'-fluoro nucleoside"
  modified_base 12: mod_base = OTHER; note = "2'-deoxy-3'-fluoro nucleoside"
  modified_base 14: mod_base = OTHER; note = "2'-deoxy-3'-fluoro nucleoside"
  modified_base 16: mod_base = OTHER; note = "2'-deoxy-3'-fluoro nucleoside"
  modified_base 18: mod_base = OTHER; note = "2'-deoxy-3'-fluoro nucleoside"
  modified_base 20: mod_base = OTHER; note = "2'-deoxy-3'-fluoro nucleoside"
  modified_base 22: mod_base = OTHER; note = "2'-deoxy-3'-fluoro nucleoside"
  modified_base 1: mod_base = OTHER; note = "2'-O-Methyl nucleoside"
  modified_base 3: mod_base = OTHER; note = "2'-O-Methyl nucleoside"
  modified_base 5: mod_base = OTHER; note = "2'-O-Methyl nucleoside"
  modified_base 7: mod_base = OTHER; note = "2'-O-Methyl nucleoside"
  modified_base 9: mod_base = OTHER; note = "2'-O-Methyl nucleoside"
  modified_base 11: mod_base = OTHER; note = "2'-O-Methyl nucleoside"
  modified_base 13: mod_base = OTHER; note = "2'-O-Methyl nucleoside"
  modified_base 15: mod_base = OTHER; note = "2'-O-Methyl nucleoside"
  modified_base 17: mod_base = OTHER; note = "2'-O-Methyl nucleoside"
  modified_base 19: mod_base = OTHER; note = "2'-O-Methyl nucleoside"
  modified_base 21: mod_base = OTHER; note = "2'-O-Methyl nucleoside"
  modified_base 23..26: mod_base = OTHER; note = "2'-O-Methyl nucleoside"
  modified_base 2..3: mod_base = OTHER; note = "phosphorothioate linked nucleoside"
  modified_base 23..24: mod_base = OTHER; note = "phosphorothioate linked nucleoside"
  source 1..26: mol_type = other RNA
atttatgcctacagcctcctaattat

SEQ ID NO: 332 - RNA, 26 nt, synthetic construct
  misc_feature 1..26: note = HBV RNAi trigger antisense strand
  modified_base 2: mod_base = OTHER; note = "2'-deoxy-3'-fluoro nucleoside"
  modified_base 4: mod_base = OTHER; note = "2'-deoxy-3'-fluoro nucleoside"
  modified_base 6: mod_base = OTHER; note = "2'-deoxy-3'-fluoro nucleoside"
  modified_base 8: mod_base = OTHER; note = "2'-deoxy-3'-fluoro nucleoside"
  modified_base 10: mod_base = OTHER; note = "2'-deoxy-3'-fluoro nucleoside"
  modified_base 12: mod_base = OTHER; note = "2'-deoxy-3'-fluoro nucleoside"
  modified_base 14: mod_base = OTHER; note = "2'-deoxy-3'-fluoro nucleoside"
  modified_base 16: mod_base = OTHER; note = "2'-deoxy-3'-fluoro nucleoside"
  modified_base 18: mod_base = OTHER; note = "2'-deoxy-3'-fluoro nucleoside"
  modified_base 20: mod_base = OTHER; note = "2'-deoxy-3'-fluoro nucleoside"
  modified_base 22: mod_base = OTHER; note = "2'-deoxy-3'-fluoro nucleoside"
  modified_base 1: mod_base = OTHER; note = "2'-O-Methyl nucleoside"
  modified_base 3: mod_base = OTHER; note = "2'-O-Methyl nucleoside"
  modified_base 5: mod_base = OTHER; note = "2'-O-Methyl nucleoside"
  modified_base 7: mod_base = OTHER; note = "2'-O-Methyl nucleoside"
  modified_base 9: mod_base = OTHER; note = "2'-O-Methyl nucleoside"
  modified_base 11: mod_base = OTHER; note = "2'-O-Methyl nucleoside"
  modified_base 13: mod_base = OTHER; note = "2'-O-Methyl nucleoside"
  modified_base 15: mod_base = OTHER; note = "2'-O-Methyl nucleoside"
  modified_base 17: mod_base = OTHER; note = "2'-O-Methyl nucleoside"
  modified_base 19: mod_base = OTHER; note = "2'-O-Methyl nucleoside"
  modified_base 21: mod_base = OTHER; note = "2'-O-Methyl nucleoside"
  modified_base 23..26: mod_base = OTHER; note = "2'-O-Methyl nucleoside"
  modified_base 2..3: mod_base = OTHER; note = "phosphorothioate linked nucleoside"
  modified_base 23..24: mod_base = OTHER; note = "phosphorothioate linked nucleoside"
  source 1..26: mol_type = other RNA
aatttatgcctacagcctcctaatat

SEQ ID NO: 333 - RNA, 26 nt, synthetic construct
  misc_feature 1..26: note = HBV RNAi trigger antisense strand
  modified_base 2: mod_base = OTHER; note = "2'-deoxy-3'-fluoro nucleoside"
  modified_base 4: mod_base = OTHER; note = "2'-deoxy-3'-fluoro nucleoside"
  modified_base 6: mod_base = OTHER; note = "2'-deoxy-3'-fluoro nucleoside"
  modified_base 8: mod_base = OTHER; note = "2'-deoxy-3'-fluoro nucleoside"
  modified_base 10: mod_base = OTHER; note = "2'-deoxy-3'-fluoro nucleoside"
  modified_base 12: mod_base = OTHER; note = "2'-deoxy-3'-fluoro nucleoside"
  modified_base 14: mod_base = OTHER; note = "2'-deoxy-3'-fluoro nucleoside"
  modified_base 16: mod_base = OTHER; note = "2'-deoxy-3'-fluoro nucleoside"
  modified_base 18: mod_base = OTHER; note = "2'-deoxy-3'-fluoro nucleoside"
  modified_base 20: mod_base = OTHER; note = "2'-deoxy-3'-fluoro nucleoside"
  modified_base 22: mod_base = OTHER; note = "2'-deoxy-3'-fluoro nucleoside"
  modified_base 1: mod_base = OTHER; note = "2'-O-Methyl nucleoside"
  modified_base 3: mod_base = OTHER; note = "2'-O-Methyl nucleoside"
  modified_base 5: mod_base = OTHER; note = "2'-O-Methyl nucleoside"
  modified_base 7: mod_base = OTHER; note = "2'-O-Methyl nucleoside"
  modified_base 9: mod_base = OTHER; note = "2'-O-Methyl nucleoside"
  modified_base 11: mod_base = OTHER; note = "2'-O-Methyl nucleoside"
  modified_base 13: mod_base = OTHER; note = "2'-O-Methyl nucleoside"
  modified_base 15: mod_base = OTHER; note = "2'-O-Methyl nucleoside"
  modified_base 17: mod_base = OTHER; note = "2'-O-Methyl nucleoside"
  modified_base 19: mod_base = OTHER; note = "2'-O-Methyl nucleoside"
  modified_base 21: mod_base = OTHER; note = "2'-O-Methyl nucleoside"
  modified_base 23..26: mod_base = OTHER; note = "2'-O-Methyl nucleoside"
  modified_base 2..3: mod_base = OTHER; note = "phosphorothioate linked nucleoside"
  modified_base 23..24: mod_base = OTHER; note = "phosphorothioate linked nucleoside"
  source 1..26: mol_type = other RNA
taatttatgcctacagcctcctatat

SEQ ID NO: 334 - RNA, 26 nt, synthetic construct
  misc_feature 1..26: note = HBV RNAi trigger antisense strand
  modified_base 2: mod_base = OTHER; note = "2'-deoxy-3'-fluoro nucleoside"
  modified_base 4: mod_base = OTHER; note = "2'-deoxy-3'-fluoro nucleoside"
  modified_base 6: mod_base = OTHER; note = "2'-deoxy-3'-fluoro nucleoside"
  modified_base 8: mod_base = OTHER; note = "2'-deoxy-3'-fluoro nucleoside"
  modified_base 10: mod_base = OTHER; note = "2'-deoxy-3'-fluoro nucleoside"
  modified_base 12: mod_base = OTHER; note = "2'-deoxy-3'-fluoro nucleoside"
  modified_base 14: mod_base = OTHER; note = "2'-deoxy-3'-fluoro nucleoside"
  modified_base 16: mod_base = OTHER; note = "2'-deoxy-3'-fluoro nucleoside"
  modified_base 18: mod_base = OTHER; note = "2'-deoxy-3'-fluoro nucleoside"
  modified_base 20: mod_base = OTHER; note = "2'-deoxy-3'-fluoro nucleoside"
  modified_base 22: mod_base = OTHER; note = "2'-deoxy-3'-fluoro nucleoside"
  modified_base 1: mod_base = OTHER; note = "2'-O-Methyl nucleoside"
  modified_base 3: mod_base = OTHER; note = "2'-O-Methyl nucleoside"
  modified_base 5: mod_base = OTHER; note = "2'-O-Methyl nucleoside"
  modified_base 7: mod_base = OTHER; note = "2'-O-Methyl nucleoside"
  modified_base 9: mod_base = OTHER; note = "2'-O-Methyl nucleoside"
  modified_base 11: mod_base = OTHER; note = "2'-O-Methyl nucleoside"
  modified_base 13: mod_base = OTHER; note = "2'-O-Methyl nucleoside"
  modified_base 15: mod_base = OTHER; note = "2'-O-Methyl nucleoside"
  modified_base 17: mod_base = OTHER; note = "2'-O-Methyl nucleoside"
  modified_base 19: mod_base = OTHER; note = "2'-O-Methyl nucleoside"
  modified_base 21: mod_base = OTHER; note = "2'-O-Methyl nucleoside"
  modified_base 23..26: mod_base = OTHER; note = "2'-O-Methyl nucleoside"
  modified_base 2..3: mod_base = OTHER; note = "phosphorothioate linked nucleoside"
  modified_base 23..24: mod_base = OTHER; note = "phosphorothioate linked nucleoside"
  source 1..26: mol_type = other RNA
tcaatttatgcctacagcctccttat

SEQ ID NO: 335 - RNA, 26 nt, synthetic construct
  misc_feature 1..26: note = HBV RNAi trigger antisense strand
  modified_base 2: mod_base = OTHER; note = "2'-deoxy-3'-fluoro nucleoside"
  modified_base 4: mod_base = OTHER; note = "2'-deoxy-3'-fluoro nucleoside"
  modified_base 6: mod_base = OTHER; note = "2'-deoxy-3'-fluoro nucleoside"
  modified_base 8: mod_base = OTHER; note = "2'-deoxy-3'-fluoro nucleoside"
  modified_base 10: mod_base = OTHER; note = "2'-deoxy-3'-fluoro nucleoside"
  modified_base 12: mod_base = OTHER; note = "2'-deoxy-3'-fluoro nucleoside"
  modified_base 14: mod_base = OTHER; note = "2'-deoxy-3'-fluoro nucleoside"
  modified_base 16: mod_base = OTHER; note = "2'-deoxy-3'-fluoro nucleoside"
  modified_base 18: mod_base = OTHER; note = "2'-deoxy-3'-fluoro nucleoside"
  modified_base 20: mod_base = OTHER; note = "2'-deoxy-3'-fluoro nucleoside"
  modified_base 22: mod_base = OTHER; note = "2'-deoxy-3'-fluoro nucleoside"
  modified_base 1: mod_base = OTHER; note = "2'-O-Methyl nucleoside"
  modified_base 3: mod_base = OTHER; note = "2'-O-Methyl nucleoside"
  modified_base 5: mod_base = OTHER; note = "2'-O-Methyl nucleoside"
  modified_base 7: mod_base = OTHER; note = "2'-O-Methyl nucleoside"
  modified_base 9: mod_base = OTHER; note = "2'-O-Methyl nucleoside"
  modified_base 11: mod_base = OTHER; note = "2'-O-Methyl nucleoside"
  modified_base 13: mod_base = OTHER; note = "2'-O-Methyl nucleoside"
  modified_base 15: mod_base = OTHER; note = "2'-O-Methyl nucleoside"
  modified_base 17: mod_base = OTHER; note = "2'-O-Methyl nucleoside"
  modified_base 19: mod_base = OTHER; note = "2'-O-Methyl nucleoside"
  modified_base 21: mod_base = OTHER; note = "2'-O-Methyl nucleoside"
  modified_base 23..26: mod_base = OTHER; note = "2'-O-Methyl nucleoside"
  modified_base 2..3: mod_base = OTHER; note = "phosphorothioate linked nucleoside"
  modified_base 23..24: mod_base = OTHER; note = "phosphorothioate linked nucleoside"
  source 1..26: mol_type = other RNA
tccaatttatgcctacagcctcctat

SEQ ID NO: 336 - RNA, 26 nt, synthetic construct
  misc_feature 1..26: note = HBV RNAi trigger antisense strand
  modified_base 2: mod_base = OTHER; note = "2'-deoxy-3'-fluoro nucleoside"
  modified_base 4: mod_base = OTHER; note = "2'-deoxy-3'-fluoro nucleoside"
  modified_base 6: mod_base = OTHER; note = "2'-deoxy-3'-fluoro nucleoside"
  modified_base 8: mod_base = OTHER; note = "2'-deoxy-3'-fluoro nucleoside"
  modified_base 10: mod_base = OTHER; note = "2'-deoxy-3'-fluoro nucleoside"
  modified_base 12: mod_base = OTHER; note = "2'-deoxy-3'-fluoro nucleoside"
  modified_base 14: mod_base = OTHER; note = "2'-deoxy-3'-fluoro nucleoside"
  modified_base 16: mod_base = OTHER; note = "2'-deoxy-3'-fluoro nucleoside"
  modified_base 18: mod_base = OTHER; note = "2'-deoxy-3'-fluoro nucleoside"
  modified_base 20: mod_base = OTHER; note = "2'-deoxy-3'-fluoro nucleoside"
  modified_base 22: mod_base = OTHER; note = "2'-deoxy-3'-fluoro nucleoside"
  modified_base 1: mod_base = OTHER; note = "2'-O-Methyl nucleoside"
  modified_base 3: mod_base = OTHER; note = "2'-O-Methyl nucleoside"
  modified_base 5: mod_base = OTHER; note = "2'-O-Methyl nucleoside"
  modified_base 7: mod_base = OTHER; note = "2'-O-Methyl nucleoside"
  modified_base 9: mod_base = OTHER; note = "2'-O-Methyl nucleoside"
  modified_base 11: mod_base = OTHER; note = "2'-O-Methyl nucleoside"
  modified_base 13: mod_base = OTHER; note = "2'-O-Methyl nucleoside"
  modified_base 15: mod_base = OTHER; note = "2'-O-Methyl nucleoside"
  modified_base 17: mod_base = OTHER; note = "2'-O-Methyl nucleoside"
  modified_base 19: mod_base = OTHER; note = "2'-O-Methyl nucleoside"
  modified_base 21: mod_base = OTHER; note = "2'-O-Methyl nucleoside"
  modified_base 23..26: mod_base = OTHER; note = "2'-O-Methyl nucleoside"
  modified_base 2..3: mod_base = OTHER; note = "phosphorothioate linked nucleoside"
  modified_base 23..24: mod_base = OTHER; note = "phosphorothioate linked nucleoside"
  source 1..26: mol_type = other RNA
tacgccgcagacacatccagcgatat

SEQ ID NO: 337 - RNA, 26 nt, synthetic construct
  misc_feature 1..26: note = HBV RNAi trigger antisense strand
  modified_base 2: mod_base = OTHER; note = "2'-deoxy-3'-fluoro nucleoside"
  modified_base 4: mod_base = OTHER; note = "2'-deoxy-3'-fluoro nucleoside"
  modified_base 6: mod_base = OTHER; note = "2'-deoxy-3'-fluoro nucleoside"
  modified_base 8: mod_base = OTHER; note = "2'-deoxy-3'-fluoro nucleoside"
  modified_base 10: mod_base = OTHER; note = "2'-deoxy-3'-fluoro nucleoside"
  modified_base 12: mod_base = OTHER; note = "2'-deoxy-3'-fluoro nucleoside"
  modified_base 14: mod_base = OTHER; note = "2'-deoxy-3'-fluoro nucleoside"
  modified_base 16: mod_base = OTHER; note = "2'-deoxy-3'-fluoro nucleoside"
  modified_base 18: mod_base = OTHER; note = "2'-deoxy-3'-fluoro nucleoside"
  modified_base 20: mod_base = OTHER; note = "2'-deoxy-3'-fluoro nucleoside"
  modified_base 22: mod_base = OTHER; note = "2'-deoxy-3'-fluoro nucleoside"
  modified_base 1: mod_base = OTHER; note = "2'-O-Methyl nucleoside"
  modified_base 3: mod_base = OTHER; note = "2'-O-Methyl nucleoside"
  modified_base 5: mod_base = OTHER; note = "2'-O-Methyl nucleoside"
  modified_base 7: mod_base = OTHER; note = "2'-O-Methyl nucleoside"
  modified_base 9: mod_base = OTHER; note = "2'-O-Methyl nucleoside"
  modified_base 11: mod_base = OTHER; note = "2'-O-Methyl nucleoside"
  modified_base 13: mod_base = OTHER; note = "2'-O-Methyl nucleoside"
  modified_base 15: mod_base = OTHER; note = "2'-O-Methyl nucleoside"
  modified_base 17: mod_base = OTHER; note = "2'-O-Methyl nucleoside"
  modified_base 19: mod_base = OTHER; note = "2'-O-Methyl nucleoside"
  modified_base 21: mod_base = OTHER; note = "2'-O-Methyl nucleoside"
  modified_base 23..26: mod_base = OTHER; note = "2'-O-Methyl nucleoside"
  modified_base 2..3: mod_base = OTHER; note = "phosphorothioate linked nucleoside"
  modified_base 23..24: mod_base = OTHER; note = "phosphorothioate linked nucleoside"
  source 1..26: mol_type = other RNA
taaaacgccgcagacacatccagtat

SEQ ID NO: 338 - RNA, 26 nt, synthetic construct
  misc_feature 1..26: note = HBV RNAi trigger antisense strand
  modified_base 2: mod_base = OTHER; note = "2'-deoxy-3'-fluoro nucleoside"
  modified_base 4: mod_base = OTHER; note = "2'-deoxy-3'-fluoro nucleoside"
  modified_base 6: mod_base = OTHER; note = "2'-deoxy-3'-fluoro nucleoside"
  modified_base 8: mod_base = OTHER; note = "2'-deoxy-3'-fluoro nucleoside"
  modified_base 10: mod_base = OTHER; note = "2'-deoxy-3'-fluoro nucleoside"
  modified_base 12: mod_base = OTHER; note = "2'-deoxy-3'-fluoro nucleoside"
  modified_base 14: mod_base = OTHER; note = "2'-deoxy-3'-fluoro nucleoside"
  modified_base 16: mod_base = OTHER; note = "2'-deoxy-3'-fluoro nucleoside"
  modified_base 18: mod_base = OTHER; note = "2'-deoxy-3'-fluoro nucleoside"
  modified_base 20: mod_base = OTHER; note = "2'-deoxy-3'-fluoro nucleoside"
  modified_base 22: mod_base = OTHER; note = "2'-deoxy-3'-fluoro nucleoside"
  modified_base 1: mod_base = OTHER; note = "2'-O-Methyl nucleoside"
  modified_base 3: mod_base = OTHER; note = "2'-O-Methyl nucleoside"
  modified_base 5: mod_base = OTHER; note = "2'-O-Methyl nucleoside"
  modified_base 7: mod_base = OTHER; note = "2'-O-Methyl nucleoside"
  modified_base 9: mod_base = OTHER; note = "2'-O-Methyl nucleoside"
  modified_base 11: mod_base = OTHER; note = "2'-O-Methyl nucleoside"
  modified_base 13: mod_base = OTHER; note = "2'-O-Methyl nucleoside"
  modified_base 15: mod_base = OTHER; note = "2'-O-Methyl nucleoside"
  modified_base 17: mod_base = OTHER; note = "2'-O-Methyl nucleoside"
  modified_base 19: mod_base = OTHER; note = "2'-O-Methyl nucleoside"
  modified_base 21: mod_base = OTHER; note = "2'-O-Methyl nucleoside"
  modified_base 23..26: mod_base = OTHER; note = "2'-O-Methyl nucleoside"
  modified_base 2..3: mod_base = OTHER; note = "phosphorothioate linked nucleoside"
  modified_base 23..24: mod_base = OTHER; note = "phosphorothioate linked nucleoside"
  source 1..26: mol_type = other RNA
ttaaaacgccgcagacacatccatat

SEQ ID NO: 339 - RNA, 26 nt, synthetic construct
  misc_feature 1..26: note = HBV RNAi trigger antisense strand
  modified_base 2: mod_base = OTHER; note = "2'-deoxy-3'-fluoro nucleoside"
  modified_base 4: mod_base = OTHER; note = "2'-deoxy-3'-fluoro nucleoside"
  modified_base 6: mod_base = OTHER; note = "2'-deoxy-3'-fluoro nucleoside"
  modified_base 8: mod_base = OTHER; note = "2'-deoxy-3'-fluoro nucleoside"
  modified_base 10: mod_base = OTHER; note = "2'-deoxy-3'-fluoro nucleoside"
  modified_base 12: mod_base = OTHER; note = "2'-deoxy-3'-fluoro nucleoside"
  modified_base 14: mod_base = OTHER; note = "2'-deoxy-3'-fluoro nucleoside"
  modified_base 16: mod_base = OTHER; note = "2'-deoxy-3'-fluoro nucleoside"
  modified_base 18: mod_base = OTHER; note = "2'-deoxy-3'-fluoro nucleoside"
  modified_base 20: mod_base = OTHER; note = "2'-deoxy-3'-fluoro nucleoside"
  modified_base 22: mod_base = OTHER; note = "2'-deoxy-3'-fluoro nucleoside"
  modified_base 1: mod_base = OTHER; note = "2'-O-Methyl nucleoside"
  modified_base 3: mod_base = OTHER; note = "2'-O-Methyl nucleoside"
  modified_base 5: mod_base = OTHER; note = "2'-O-Methyl nucleoside"
  modified_base 7: mod_base = OTHER; note = "2'-O-Methyl nucleoside"
  modified_base 9: mod_base = OTHER; note = "2'-O-Methyl nucleoside"
  modified_base 11: mod_base = OTHER; note = "2'-O-Methyl nucleoside"
  modified_base 13: mod_base = OTHER; note = "2'-O-Methyl nucleoside"
  modified_base 15: mod_base = OTHER; note = "2'-O-Methyl nucleoside"
  modified_base 17: mod_base = OTHER; note = "2'-O-Methyl nucleoside"
  modified_base 19: mod_base = OTHER; note = "2'-O-Methyl nucleoside"
  modified_base 21: mod_base = OTHER; note = "2'-O-Methyl nucleoside"
  modified_base 23..26: mod_base = OTHER; note = "2'-O-Methyl nucleoside"
  modified_base 2..3: mod_base = OTHER; note = "phosphorothioate linked nucleoside"
  modified_base 23..24: mod_base = OTHER; note = "phosphorothioate linked nucleoside"
  source 1..26: mol_type = other RNA
ttgataaaacgccgcagacacattat

SEQ ID NO: 340 - RNA, 26 nt, synthetic construct
  misc_feature 1..26: note = HBV RNAi trigger antisense strand
  modified_base 2: mod_base = OTHER; note = "2'-deoxy-3'-fluoro nucleoside"
  modified_base 4: mod_base = OTHER; note = "2'-deoxy-3'-fluoro nucleoside"
  modified_base 6: mod_base = OTHER; note = "2'-deoxy-3'-fluoro nucleoside"
  modified_base 8: mod_base = OTHER; note = "2'-deoxy-3'-fluoro nucleoside"
  modified_base 10: mod_base = OTHER; note = "2'-deoxy-3'-fluoro nucleoside"
  modified_base 12: mod_base = OTHER; note = "2'-deoxy-3'-fluoro nucleoside"
  modified_base 14: mod_base = OTHER; note = "2'-deoxy-3'-fluoro nucleoside"
  modified_base 16: mod_base = OTHER; note = "2'-deoxy-3'-fluoro nucleoside"
  modified_base 18: mod_base = OTHER; note = "2'-deoxy-3'-fluoro nucleoside"
  modified_base 20: mod_base = OTHER; note = "2'-deoxy-3'-fluoro nucleoside"
  modified_base 22: mod_base = OTHER; note = "2'-deoxy-3'-fluoro nucleoside"
  modified_base 1: mod_base = OTHER; note = "2'-O-Methyl nucleoside"
  modified_base 3: mod_base = OTHER; note = "2'-O-Methyl nucleoside"
  modified_base 5: mod_base = OTHER; note = "2'-O-Methyl nucleoside"
  modified_base 7: mod_base = OTHER; note = "2'-O-Methyl nucleoside"
  modified_base 9: mod_base = OTHER; note = "2'-O-Methyl nucleoside"
  modified_base 11: mod_base = OTHER; note = "2'-O-Methyl nucleoside"
  modified_base 13: mod_base = OTHER; note = "2'-O-Methyl nucleoside"
  modified_base 15: mod_base = OTHER; note = "2'-O-Methyl nucleoside"
  modified_base 17: mod_base = OTHER; note = "2'-O-Methyl nucleoside"
  modified_base 19: mod_base = OTHER; note = "2'-O-Methyl nucleoside"
  modified_base 21: mod_base = OTHER; note = "2'-O-Methyl nucleoside"
  modified_base 23..26: mod_base = OTHER; note = "2'-O-Methyl nucleoside"
  modified_base 2..3: mod_base = OTHER; note = "phosphorothioate linked nucleoside"
  modified_base 23..24: mod_base = OTHER; note = "phosphorothioate linked nucleoside"
  source 1..26: mol_type = other RNA
tacgggcaacataccttgataattat

SEQ ID NO: 341 - RNA, 26 nt, synthetic construct
  misc_feature 1..26: note = HBV RNAi trigger antisense strand
  modified_base 2: mod_base = OTHER; note = "2'-deoxy-3'-fluoro nucleoside"
  modified_base 4: mod_base = OTHER; note = "2'-deoxy-3'-fluoro nucleoside"
  modified_base 6: mod_base = OTHER; note = "2'-deoxy-3'-fluoro nucleoside"
  modified_base 8: mod_base = OTHER; note = "2'-deoxy-3'-fluoro nucleoside"
  modified_base 10: mod_base = OTHER; note = "2'-deoxy-3'-fluoro nucleoside"
  modified_base 12: mod_base = OTHER; note = "2'-deoxy-3'-fluoro nucleoside"
  modified_base 14: mod_base = OTHER; note = "2'-deoxy-3'-fluoro nucleoside"
  modified_base 16: mod_base = OTHER; note = "2'-deoxy-3'-fluoro nucleoside"
  modified_base 18: mod_base = OTHER; note = "2'-deoxy-3'-fluoro nucleoside"
  modified_base 20: mod_base = OTHER; note = "2'-deoxy-3'-fluoro nucleoside"
  modified_base 22: mod_base = OTHER; note = "2'-deoxy-3'-fluoro nucleoside"
  modified_base 1: mod_base = OTHER; note = "2'-O-Methyl nucleoside"
  modified_base 3: mod_base = OTHER; note = "2'-O-Methyl nucleoside"
  modified_base 5: mod_base = OTHER; note = "2'-O-Methyl nucleoside"
  modified_base 7: mod_base = OTHER; note = "2'-O-Methyl nucleoside"
  modified_base 9: mod_base = OTHER; note = "2'-O-Methyl nucleoside"
  modified_base 11: mod_base = OTHER; note = "2'-O-Methyl nucleoside"
  modified_base 13: mod_base = OTHER; note = "2'-O-Methyl nucleoside"
  modified_base 15: mod_base = OTHER; note = "2'-O-Methyl nucleoside"
  modified_base 17: mod_base = OTHER; note = "2'-O-Methyl nucleoside"
  modified_base 19: mod_base = OTHER; note = "2'-O-Methyl nucleoside"
  modified_base 21: mod_base = OTHER; note = "2'-O-Methyl nucleoside"
  modified_base 23..26: mod_base = OTHER; note = "2'-O-Methyl nucleoside"
  modified_base 2..3: mod_base = OTHER; note = "phosphorothioate linked nucleoside"
  modified_base 23..24: mod_base = OTHER; note = "phosphorothioate linked nucleoside"
  source 1..26: mol_type = other RNA
taacgggcaacataccttgataatat

SEQ ID NO: 342 - RNA, 26 nt, synthetic construct
  misc_feature 1..26: note = HBV RNAi trigger antisense strand
  modified_base 2: mod_base = OTHER; note = "2'-deoxy-3'-fluoro nucleoside"
  modified_base 4: mod_base = OTHER; note = "2'-deoxy-3'-fluoro nucleoside"
  modified_base 6: mod_base = OTHER; note = "2'-deoxy-3'-fluoro nucleoside"
  modified_base 8: mod_base = OTHER; note = "2'-deoxy-3'-fluoro nucleoside"
  modified_base 10: mod_base = OTHER; note = "2'-deoxy-3'-fluoro nucleoside"
  modified_base 12: mod_base = OTHER; note = "2'-deoxy-3'-fluoro nucleoside"
  modified_base 14: mod_base = OTHER; note = "2'-deoxy-3'-fluoro nucleoside"
  modified_base 16: mod_base = OTHER; note = "2'-deoxy-3'-fluoro nucleoside"
  modified_base 18: mod_base = OTHER; note = "2'-deoxy-3'-fluoro nucleoside"
  modified_base 20: mod_base = OTHER; note = "2'-deoxy-3'-fluoro nucleoside"
  modified_base 22: mod_base = OTHER; note = "2'-deoxy-3'-fluoro nucleoside"
  modified_base 1: mod_base = OTHER; note = "2'-O-Methyl nucleoside"
  modified_base 3: mod_base = OTHER; note = "2'-O-Methyl nucleoside"
  modified_base 5: mod_base = OTHER; note = "2'-O-Methyl nucleoside"
  modified_base 7: mod_base = OTHER; note = "2'-O-Methyl nucleoside"
  modified_base 9: mod_base = OTHER; note = "2'-O-Methyl nucleoside"
  modified_base 11: mod_base = OTHER; note = "2'-O-Methyl nucleoside"
  modified_base 13: mod_base = OTHER; note = "2'-O-Methyl nucleoside"
  modified_base 15: mod_base = OTHER; note = "2'-O-Methyl nucleoside"
  modified_base 17: mod_base = OTHER; note = "2'-O-Methyl nucleoside"
  modified_base 19: mod_base = OTHER; note = "2'-O-Methyl nucleoside"
  modified_base 21: mod_base = OTHER; note = "2'-O-Methyl nucleoside"
  modified_base 23..26: mod_base = OTHER; note = "2'-O-Methyl nucleoside"
  modified_base 2..3: mod_base = OTHER; note = "phosphorothioate linked nucleoside"
  modified_base 23..24: mod_base = OTHER; note = "phosphorothioate linked nucleoside"
  source 1..26: mol_type = other RNA
taaacgggcaacataccttgatatat

SEQ ID NO: 343 - RNA, 26 nt, synthetic construct
  misc_feature 1..26: note = HBV RNAi trigger antisense strand
  modified_base 2: mod_base = OTHER; note = "2'-deoxy-3'-fluoro nucleoside"
  modified_base 4: mod_base = OTHER; note = "2'-deoxy-3'-fluoro nucleoside"
  modified_base 6: mod_base = OTHER; note = "2'-deoxy-3'-fluoro nucleoside"
  modified_base 8: mod_base = OTHER; note = "2'-deoxy-3'-fluoro nucleoside"
  modified_base 10: mod_base = OTHER; note = "2'-deoxy-3'-fluoro nucleoside"
  modified_base 12: mod_base = OTHER; note = "2'-deoxy-3'-fluoro nucleoside"
  modified_base 14: mod_base = OTHER; note = "2'-deoxy-3'-fluoro nucleoside"
  modified_base 16: mod_base = OTHER; note = "2'-deoxy-3'-fluoro nucleoside"
  modified_base 18: mod_base = OTHER; note = "2'-deoxy-3'-fluoro nucleoside"
  modified_base 20: mod_base = OTHER; note = "2'-deoxy-3'-fluoro nucleoside"
  modified_base 22: mod_base = OTHER; note = "2'-deoxy-3'-fluoro nucleoside"
  modified_base 1: mod_base = OTHER; note = "2'-O-Methyl nucleoside"
  modified_base 3: mod_base = OTHER; note = "2'-O-Methyl nucleoside"
  modified_base 5: mod_base = OTHER; note = "2'-O-Methyl nucleoside"
  modified_base 7: mod_base = OTHER; note = "2'-O-Methyl nucleoside"
  modified_base 9: mod_base = OTHER; note = "2'-O-Methyl nucleoside"
  modified_base 11: mod_base = OTHER; note = "2'-O-Methyl nucleoside"
  modified_base 13: mod_base = OTHER; note = "2'-O-Methyl nucleoside"
  modified_base 15: mod_base = OTHER; note = "2'-O-Methyl nucleoside"
  modified_base 17: mod_base = OTHER; note = "2'-O-Methyl nucleoside"
  modified_base 19: mod_base = OTHER; note = "2'-O-Methyl nucleoside"
  modified_base 21: mod_base = OTHER; note = "2'-O-Methyl nucleoside"
  modified_base 23..26: mod_base = OTHER; note = "2'-O-Methyl nucleoside"
  modified_base 2..3: mod_base = OTHER; note = "phosphorothioate linked nucleoside"
  modified_base 23..24: mod_base = OTHER; note = "phosphorothioate linked nucleoside"
  source 1..26: mol_type = other RNA
tcaaacgggcaacataccttgattat

SEQ ID NO: 344 - RNA, 26 nt, synthetic construct
  misc_feature 1..26: note = HBV RNAi trigger antisense strand
  modified_base 2: mod_base = OTHER; note = "2'-deoxy-3'-fluoro nucleoside"
  modified_base 4: mod_base = OTHER; note = "2'-deoxy-3'-fluoro nucleoside"
  modified_base 6: mod_base = OTHER; note = "2'-deoxy-3'-fluoro nucleoside"
  modified_base 8: mod_base = OTHER; note = "2'-deoxy-3'-fluoro nucleoside"
  modified_base 10: mod_base = OTHER; note = "2'-deoxy-3'-fluoro nucleoside"
  modified_base 12: mod_base = OTHER; note = "2'-deoxy-3'-fluoro nucleoside"
  modified_base 14: mod_base = OTHER; note = "2'-deoxy-3'-fluoro nucleoside"
  modified_base 16: mod_base = OTHER; note = "2'-deoxy-3'-fluoro nucleoside"
  modified_base 18: mod_base = OTHER; note = "2'-deoxy-3'-fluoro nucleoside"
  modified_base 20: mod_base = OTHER; note = "2'-deoxy-3'-fluoro nucleoside"
  modified_base 22: mod_base = OTHER; note = "2'-deoxy-3'-fluoro nucleoside"
  modified_base 1: mod_base = OTHER; note = "2'-O-Methyl nucleoside"
  modified_base 3: mod_base = OTHER; note = "2'-O-Methyl nucleoside"
  modified_base 5: mod_base = OTHER; note = "2'-O-Methyl nucleoside"
  modified_base 7: mod_base = OTHER; note = "2'-O-Methyl nucleoside"
  modified_base 9: mod_base = OTHER; note = "2'-O-Methyl nucleoside"
  modified_base 11: mod_base = OTHER; note = "2'-O-Methyl nucleoside"
  modified_base 13: mod_base = OTHER; note = "2'-O-Methyl nucleoside"
  modified_base 15: mod_base = OTHER; note = "2'-O-Methyl nucleoside"
  modified_base 17: mod_base = OTHER; note = "2'-O-Methyl nucleoside"
  modified_base 19: mod_base = OTHER; note = "2'-O-Methyl nucleoside"
  modified_base 21: mod_base = OTHER; note = "2'-O-Methyl nucleoside"
  modified_base 23..26: mod_base = OTHER; note = "2'-O-Methyl nucleoside"
  modified_base 2..3: mod_base = OTHER; note = "phosphorothioate linked nucleoside"
  modified_base 23..24: mod_base = OTHER; note = "phosphorothioate linked nucleoside"
  source 1..26: mol_type = other RNA
tacaaacgggcaacataccttgatat

SEQ ID NO: 345 - RNA, 26 nt, synthetic construct
  misc_feature 1..26: note = HBV RNAi trigger antisense strand
  modified_base 2: mod_base = OTHER; note = "2'-deoxy-3'-fluoro nucleoside"
  modified_base 4: mod_base = OTHER; note = "2'-deoxy-3'-fluoro nucleoside"
  modified_base 6: mod_base = OTHER; note = "2'-deoxy-3'-fluoro nucleoside"
  modified_base 8: mod_base = OTHER; note = "2'-deoxy-3'-fluoro nucleoside"
  modified_base 10: mod_base = OTHER; note = "2'-deoxy-3'-fluoro nucleoside"
  modified_base 12: mod_base = OTHER; note = "2'-deoxy-3'-fluoro nucleoside"
  modified_base 14: mod_base = OTHER; note = "2'-deoxy-3'-fluoro nucleoside"
  modified_base 16: mod_base = OTHER; note = "2'-deoxy-3'-fluoro nucleoside"
  modified_base 18: mod_base = OTHER; note = "2'-deoxy-3'-fluoro nucleoside"
  modified_base 20: mod_base = OTHER; note = "2'-deoxy-3'-fluoro nucleoside"
  modified_base 22: mod_base = OTHER; note = "2'-deoxy-3'-fluoro nucleoside"
  modified_base 1: mod_base = OTHER; note = "2'-O-Methyl nucleoside"
  modified_base 3: mod_base = OTHER; note = "2'-O-Methyl nucleoside"
  modified_base 5: mod_base = OTHER; note = "2'-O-Methyl nucleoside"
  modified_base 7: mod_base = OTHER; note = "2'-O-Methyl nucleoside"
  modified_base 9: mod_base = OTHER; note = "2'-O-Methyl nucleoside"
  modified_base 11: mod_base = OTHER; note = "2'-O-Methyl nucleoside"
  modified_base 13: mod_base = OTHER; note = "2'-O-Methyl nucleoside"
  modified_base 15: mod_base = OTHER; note = "2'-O-Methyl nucleoside"
  modified_base 17: mod_base = OTHER; note = "2'-O-Methyl nucleoside"
  modified_base 19: mod_base = OTHER; note = "2'-O-Methyl nucleoside"
  modified_base 21: mod_base = OTHER; note = "2'-O-Methyl nucleoside"
  modified_base 23..26: mod_base = OTHER; note = "2'-O-Methyl nucleoside"
  modified_base 2..3: mod_base = OTHER; note = "phosphorothioate linked nucleoside"
  modified_base 23..24: mod_base = OTHER; note = "phosphorothioate linked nucleoside"
  source 1..26: mol_type = other RNA
taggacaaacgggcaacataccttat

SEQ ID NO: 346 - RNA, 26 nt, synthetic construct
  misc_feature 1..26: note = HBV RNAi trigger antisense strand
  modified_base 2: mod_base = OTHER; note = "2'-deoxy-3'-fluoro nucleoside"
  modified_base 4: mod_base = OTHER; note = "2'-deoxy-3'-fluoro nucleoside"
  modified_base 6: mod_base = OTHER; note = "2'-deoxy-3'-fluoro nucleoside"
  modified_base 8: mod_base = OTHER; note = "2'-deoxy-3'-fluoro nucleoside"
  modified_base 10: mod_base = OTHER; note = "2'-deoxy-3'-fluoro nucleoside"
  modified_base 12: mod_base = OTHER; note = "2'-deoxy-3'-fluoro nucleoside"
  modified_base 14: mod_base = OTHER; note = "2'-deoxy-3'-fluoro nucleoside"
  modified_base 16: mod_base = OTHER; note = "2'-deoxy-3'-fluoro nucleoside"
  modified_base 18: mod_base = OTHER; note = "2'-deoxy-3'-fluoro nucleoside"
  modified_base 20: mod_base = OTHER; note = "2'-deoxy-3'-fluoro nucleoside"
  modified_base 22: mod_base = OTHER; note = "2'-deoxy-3'-fluoro nucleoside"
  modified_base 1: mod_base = OTHER; note = "2'-O-Methyl nucleoside"
  modified_base 3: mod_base = OTHER; note = "2'-O-Methyl nucleoside"
  modified_base 5: mod_base = OTHER; note = "2'-O-Methyl nucleoside"
  modified_base 7: mod_base = OTHER; note = "2'-O-Methyl nucleoside"
  modified_base 9: mod_base = OTHER; note = "2'-O-Methyl nucleoside"
  modified_base 11: mod_base = OTHER; note = "2'-O-Methyl nucleoside"
  modified_base 13: mod_base = OTHER; note = "2'-O-Methyl nucleoside"
  modified_base 15: mod_base = OTHER; note = "2'-O-Methyl nucleoside"
  modified_base 17: mod_base = OTHER; note = "2'-O-Methyl nucleoside"
  modified_base 19: mod_base = OTHER; note = "2'-O-Methyl nucleoside"
  modified_base 21: mod_base = OTHER; note = "2'-O-Methyl nucleoside"
  modified_base 23..26: mod_base = OTHER; note = "2'-O-Methyl nucleoside"
  modified_base 2..3: mod_base = OTHER; note = "phosphorothioate linked nucleoside"
  modified_base 23..24: mod_base = OTHER; note = "phosphorothioate linked nucleoside"
  source 1..26: mol_type = other RNA
tactagtaaactgagccaggagatat

SEQ ID NO: 347 - RNA, 26 nt, synthetic construct
  misc_feature 1..26: note = HBV RNAi trigger antisense strand
  modified_base 2: mod_base = OTHER; note = "2'-deoxy-3'-fluoro nucleoside"
  modified_base 4: mod_base = OTHER; note = "2'-deoxy-3'-fluoro nucleoside"
  modified_base 6: mod_base = OTHER; note = "2'-deoxy-3'-fluoro nucleoside"
  modified_base 8: mod_base = OTHER; note = "2'-deoxy-3'-fluoro nucleoside"
  modified_base 10: mod_base = OTHER; note = "2'-deoxy-3'-fluoro nucleoside"
  modified_base 12: mod_base = OTHER; note = "2'-deoxy-3'-fluoro nucleoside"
  modified_base 14: mod_base = OTHER; note = "2'-deoxy-3'-fluoro nucleoside"
  modified_base 16: mod_base = OTHER; note = "2'-deoxy-3'-fluoro nucleoside"
  modified_base 18: mod_base = OTHER; note = "2'-deoxy-3'-fluoro nucleoside"
  modified_base 20: mod_base = OTHER; note = "2'-deoxy-3'-fluoro nucleoside"
  modified_base 22: mod_base = OTHER; note = "2'-deoxy-3'-fluoro nucleoside"
  modified_base 1: mod_base = OTHER; note = "2'-O-Methyl nucleoside"
  modified_base 3: mod_base = OTHER; note = "2'-O-Methyl nucleoside"
  modified_base 5: mod_base = OTHER; note = "2'-O-Methyl nucleoside"
  modified_base 7: mod_base = OTHER; note = "2'-O-Methyl nucleoside"
  modified_base 9: mod_base = OTHER; note = "2'-O-Methyl nucleoside"
  modified_base 11: mod_base = OTHER; note = "2'-O-Methyl nucleoside"
  modified_base 13: mod_base = OTHER; note = "2'-O-Methyl nucleoside"
  modified_base 15: mod_base = OTHER; note = "2'-O-Methyl nucleoside"
  modified_base 17: mod_base = OTHER; note = "2'-O-Methyl nucleoside"
  modified_base 19: mod_base = OTHER; note = "2'-O-Methyl nucleoside"
  modified_base 21: mod_base = OTHER; note = "2'-O-Methyl nucleoside"
  modified_base 23..26: mod_base = OTHER; note = "2'-O-Methyl nucleoside"
  modified_base 2..3: mod_base = OTHER; note = "phosphorothioate linked nucleoside"
  modified_base 23..24: mod_base = OTHER; note = "phosphorothioate linked nucleoside"
  source 1..26: mol_type = other RNA
tggcactagtaaactgagccaagtat

SEQ ID NO: 348 - RNA, 26 nt, synthetic construct
  misc_feature 1..26: note = HBV RNAi trigger antisense strand
  modified_base 2: mod_base = OTHER; note = "2'-deoxy-3'-fluoro nucleoside"
  modified_base 4: mod_base = OTHER; note = "2'-deoxy-3'-fluoro nucleoside"
  modified_base 6: mod_base = OTHER; note = "2'-deoxy-3'-fluoro nucleoside"
  modified_base 8: mod_base = OTHER; note = "2'-deoxy-3'-fluoro nucleoside"
  modified_base 10: mod_base = OTHER; note = "2'-deoxy-3'-fluoro nucleoside"
  modified_base 12: mod_base = OTHER; note = "2'-deoxy-3'-fluoro nucleoside"
  modified_base 14: mod_base = OTHER; note = "2'-deoxy-3'-fluoro nucleoside"
  modified_base 16: mod_base = OTHER; note = "2'-deoxy-3'-fluoro nucleoside"
  modified_base 18: mod_base = OTHER; note = "2'-deoxy-3'-fluoro nucleoside"
  modified_base 20: mod_base = OTHER; note = "2'-deoxy-3'-fluoro nucleoside"
  modified_base 22: mod_base = OTHER; note = "2'-deoxy-3'-fluoro nucleoside"
  modified_base 1: mod_base = OTHER; note = "2'-O-Methyl nucleoside"
  modified_base 3: mod_base = OTHER; note = "2'-O-Methyl nucleoside"
  modified_base 5: mod_base = OTHER; note = "2'-O-Methyl nucleoside"
  modified_base 7: mod_base = OTHER; note = "2'-O-Methyl nucleoside"
  modified_base 9: mod_base = OTHER; note = "2'-O-Methyl nucleoside"
  modified_base 11: mod_base = OTHER; note = "2'-O-Methyl nucleoside"
  modified_base 13: mod_base = OTHER; note = "2'-O-Methyl nucleoside"
  modified_base 15: mod_base = OTHER; note = "2'-O-Methyl nucleoside"
  modified_base 17: mod_base = OTHER; note = "2'-O-Methyl nucleoside"
  modified_base 19: mod_base = OTHER; note = "2'-O-Methyl nucleoside"
  modified_base 21: mod_base = OTHER; note = "2'-O-Methyl nucleoside"
  modified_base 23..26: mod_base = OTHER; note = "2'-O-Methyl nucleoside"
  modified_base 2..3: mod_base = OTHER; note = "phosphorothioate linked nucleoside"
  modified_base 23..24: mod_base = OTHER; note = "phosphorothioate linked nucleoside"
  source 1..26: mol_type = other RNA
ttggcactagtaaactgagccaatat

SEQ ID NO: 349 - RNA, 26 nt, synthetic construct
  misc_feature 1..26: note = HBV RNAi trigger antisense strand
  modified_base 2: mod_base = OTHER; note = "2'-deoxy-3'-fluoro nucleoside"
  modified_base 4: mod_base = OTHER; note = "2'-deoxy-3'-fluoro nucleoside"
  modified_base 6: mod_base = OTHER; note = "2'-deoxy-3'-fluoro nucleoside"
  modified_base 8: mod_base = OTHER; note = "2'-deoxy-3'-fluoro nucleoside"
  modified_base 10: mod_base = OTHER; note = "2'-deoxy-3'-fluoro nucleoside"
  modified_base 12: mod_base = OTHER; note = "2'-deoxy-3'-fluoro nucleoside"
  modified_base 14: mod_base = OTHER; note = "2'-deoxy-3'-fluoro nucleoside"
  modified_base 16: mod_base = OTHER; note = "2'-deoxy-3'-fluoro nucleoside"
  modified_base 18: mod_base = OTHER; note = "2'-deoxy-3'-fluoro nucleoside"
  modified_base 20: mod_base = OTHER; note = "2'-deoxy-3'-fluoro nucleoside"
  modified_base 22: mod_base = OTHER; note = "2'-deoxy-3'-fluoro nucleoside"
  modified_base 1: mod_base = OTHER; note = "2'-O-Methyl nucleoside"
  modified_base 3: mod_base = OTHER; note = "2'-O-Methyl nucleoside"
  modified_base 5: mod_base = OTHER; note = "2'-O-Methyl nucleoside"
  modified_base 7: mod_base = OTHER; note = "2'-O-Methyl nucleoside"
  modified_base 9: mod_base = OTHER; note = "2'-O-Methyl nucleoside"
  modified_base 11: mod_base = OTHER; note = "2'-O-Methyl nucleoside"
  modified_base 13: mod_base = OTHER; note = "2'-O-Methyl nucleoside"
  modified_base 15: mod_base = OTHER; note = "2'-O-Methyl nucleoside"
  modified_base 17: mod_base = OTHER; note = "2'-O-Methyl nucleoside"
  modified_base 19: mod_base = OTHER; note = "2'-O-Methyl nucleoside"
  modified_base 21: mod_base = OTHER; note = "2'-O-Methyl nucleoside"
  modified_base 23..26: mod_base = OTHER; note = "2'-O-Methyl nucleoside"
  modified_base 2..3: mod_base = OTHER; note = "phosphorothioate linked nucleoside"
  modified_base 23..24: mod_base = OTHER; note = "phosphorothioate linked nucleoside"
  source 1..26: mol_type = other RNA
taatggcactagtaaactgagcctat

SEQ ID NO: 350 - RNA, 26 nt, synthetic construct
  misc_feature 1..26: note = HBV RNAi trigger antisense strand
  modified_base 2: mod_base = OTHER; note = "2'-deoxy-3'-fluoro nucleoside"
  modified_base 4: mod_base = OTHER; note = "2'-deoxy-3'-fluoro nucleoside"
  modified_base 6: mod_base = OTHER; note = "2'-deoxy-3'-fluoro nucleoside"
  modified_base 8: mod_base = OTHER; note = "2'-deoxy-3'-fluoro nucleoside"
  modified_base 10: mod_base = OTHER; note = "2'-deoxy-3'-fluoro nucleoside"
  modified_base 12: mod_base = OTHER; note = "2'-deoxy-3'-fluoro nucleoside"
  modified_base 14: mod_base = OTHER; note = "2'-deoxy-3'-fluoro nucleoside"
  modified_base 16: mod_base = OTHER; note = "2'-deoxy-3'-fluoro nucleoside"
  modified_base 18: mod_base = OTHER; note = "2'-deoxy-3'-fluoro nucleoside"
  modified_base 20: mod_base = OTHER; note = "2'-deoxy-3'-fluoro nucleoside"
  modified_base 22: mod_base = OTHER; note = "2'-deoxy-3'-fluoro nucleoside"
  modified_base 1: mod_base = OTHER; note = "2'-O-Methyl nucleoside"
  modified_base 3: mod_base = OTHER; note = "2'-O-Methyl nucleoside"
  modified_base 5: mod_base = OTHER; note = "2'-O-Methyl nucleoside"
  modified_base 7: mod_base = OTHER; note = "2'-O-Methyl nucleoside"
  modified_base 9: mod_base = OTHER; note = "2'-O-Methyl nucleoside"
  modified_base 11: mod_base = OTHER; note = "2'-O-Methyl nucleoside"
  modified_base 13: mod_base = OTHER; note = "2'-O-Methyl nucleoside"
  modified_base 15: mod_base = OTHER; note = "2'-O-Methyl nucleoside"
  modified_base 17: mod_base = OTHER; note = "2'-O-Methyl nucleoside"
  modified_base 19: mod_base = OTHER; note = "2'-O-Methyl nucleoside"
  modified_base 21: mod_base = OTHER; note = "2'-O-Methyl nucleoside"
  modified_base 23..26: mod_base = OTHER; note = "2'-O-Methyl nucleoside"
  modified_base 2..3: mod_base = OTHER; note = "phosphorothioate linked nucleoside"
  modified_base 23..24: mod_base = OTHER; note = "phosphorothioate linked nucleoside"
  source 1..26: mol_type = other RNA
taaatggcactagtaaactgagctat

SEQ ID NO: 351 - RNA, 26 nt, synthetic construct
  misc_feature 1..26: note = HBV RNAi trigger antisense strand
  modified_base 2: mod_base = OTHER; note = "2'-deoxy-3'-fluoro nucleoside"
  modified_base 4: mod_base = OTHER; note = "2'-deoxy-3'-fluoro nucleoside"
  modified_base 6: mod_base = OTHER; note = "2'-deoxy-3'-fluoro nucleoside"
  modified_base 8: mod_base = OTHER; note = "2'-deoxy-3'-fluoro nucleoside"
  modified_base 10: mod_base = OTHER; note = "2'-deoxy-3'-fluoro nucleoside"
  modified_base 12: mod_base = OTHER; note = "2'-deoxy-3'-fluoro nucleoside"
  modified_base 14: mod_base = OTHER; note = "2'-deoxy-3'-fluoro nucleoside"
  modified_base 16: mod_base = OTHER; note = "2'-deoxy-3'-fluoro nucleoside"
  modified_base 18: mod_base = OTHER; note = "2'-deoxy-3'-fluoro nucleoside"
  modified_base 20: mod_base = OTHER; note = "2'-deoxy-3'-fluoro nucleoside"
  modified_base 22: mod_base = OTHER; note = "2'-deoxy-3'-fluoro nucleoside"
  modified_base 1: mod_base = OTHER; note = "2'-O-Methyl nucleoside"
  modified_base 3: mod_base = OTHER; note = "2'-O-Methyl nucleoside"
  modified_base 5: mod_base = OTHER; note = "2'-O-Methyl nucleoside"
  modified_base 7: mod_base = OTHER; note = "2'-O-Methyl nucleoside"
  modified_base 9: mod_base = OTHER; note = "2'-O-Methyl nucleoside"
  modified_base 11: mod_base = OTHER; note = "2'-O-Methyl nucleoside"
  modified_base 13: mod_base = OTHER; note = "2'-O-Methyl nucleoside"
  modified_base 15: mod_base = OTHER; note = "2'-O-Methyl nucleoside"
  modified_base 17: mod_base = OTHER; note = "2'-O-Methyl nucleoside"
  modified_base 19: mod_base = OTHER; note = "2'-O-Methyl nucleoside"
  modified_base 21: mod_base = OTHER; note = "2'-O-Methyl nucleoside"
  modified_base 23..26: mod_base = OTHER; note = "2'-O-Methyl nucleoside"
  modified_base 2..3: mod_base = OTHER; note = "phosphorothioate linked nucleoside"
  modified_base 23..24: mod_base = OTHER; note = "phosphorothioate linked nucleoside"
  source 1..26: mol_type = other RNA
tcaaatggcactagtaaactgagtat

SEQ ID NO: 352 - RNA, 26 nt, synthetic construct
  misc_feature 1..26: note = HBV RNAi trigger antisense strand
  modified_base 2: mod_base = OTHER; note = "2'-deoxy-3'-fluoro nucleoside"
  modified_base 4: mod_base = OTHER; note = "2'-deoxy-3'-fluoro nucleoside"
  modified_base 6: mod_base = OTHER; note = "2'-deoxy-3'-fluoro nucleoside"
  modified_base 8: mod_base = OTHER; note = "2'-deoxy-3'-fluoro nucleoside"
  modified_base 10: mod_base = OTHER; note = "2'-deoxy-3'-fluoro nucleoside"
  modified_base 12: mod_base = OTHER; note = "2'-deoxy-3'-fluoro nucleoside"
  modified_base 14: mod_base = OTHER; note = "2'-deoxy-3'-fluoro nucleoside"
  modified_base 16: mod_base = OTHER; note = "2'-deoxy-3'-fluoro nucleoside"
  modified_base 18: mod_base = OTHER; note = "2'-deoxy-3'-fluoro nucleoside"
  modified_base 20: mod_base = OTHER; note = "2'-deoxy-3'-fluoro nucleoside"
  modified_base 22: mod_base = OTHER; note = "2'-deoxy-3'-fluoro nucleoside"
  modified_base 1: mod_base = OTHER; note = "2'-O-Methyl nucleoside"
  modified_base 3: mod_base = OTHER; note = "2'-O-Methyl nucleoside"
  modified_base 5: mod_base = OTHER; note = "2'-O-Methyl nucleoside"
  modified_base 7: mod_base = OTHER; note = "2'-O-Methyl nucleoside"
  modified_base 9: mod_base = OTHER; note = "2'-O-Methyl nucleoside"
  modified_base 11: mod_base = OTHER; note = "2'-O-Methyl nucleoside"
  modified_base 13: mod_base = OTHER; note = "2'-O-Methyl nucleoside"
  modified_base 15: mod_base = OTHER; note = "2'-O-Methyl nucleoside"
  modified_base 17: mod_base = OTHER; note = "2'-O-Methyl nucleoside"
  modified_base 19: mod_base = OTHER; note = "2'-O-Methyl nucleoside"
  modified_base 21: mod_base = OTHER; note = "2'-O-Methyl nucleoside"
  modified_base 23..26: mod_base = OTHER; note = "2'-O-Methyl nucleoside"
  modified_base 2..3: mod_base = OTHER; note = "phosphorothioate linked nucleoside"
  modified_base 23..24: mod_base = OTHER; note = "phosphorothioate linked nucleoside"
  source 1..26: mol_type = other RNA
tacaaatggcactagtaaactgatat

SEQ ID NO: 353 - RNA, 26 nt, synthetic construct
  misc_feature 1..26: note = HBV RNAi trigger antisense strand
  modified_base 2: mod_base = OTHER; note = "2'-deoxy-3'-fluoro nucleoside"
  modified_base 4: mod_base = OTHER; note = "2'-deoxy-3'-fluoro nucleoside"
  modified_base 6: mod_base = OTHER; note = "2'-deoxy-3'-fluoro nucleoside"
  modified_base 8: mod_base = OTHER; note = "2'-deoxy-3'-fluoro nucleoside"
  modified_base 10: mod_base = OTHER; note = "2'-deoxy-3'-fluoro nucleoside"
  modified_base 12: mod_base = OTHER; note = "2'-deoxy-3'-fluoro nucleoside"
  modified_base 14: mod_base = OTHER; note = "2'-deoxy-3'-fluoro nucleoside"
  modified_base 16: mod_base = OTHER; note = "2'-deoxy-3'-fluoro nucleoside"
  modified_base 18: mod_base = OTHER; note = "2'-deoxy-3'-fluoro nucleoside"
  modified_base 20: mod_base = OTHER; note = "2'-deoxy-3'-fluoro nucleoside"
  modified_base 22: mod_base = OTHER; note = "2'-deoxy-3'-fluoro nucleoside"
  modified_base 1: mod_base = OTHER; note = "2'-O-Methyl nucleoside"
  modified_base 3: mod_base = OTHER; note = "2'-O-Methyl nucleoside"
  modified_base 5: mod_base = OTHER; note = "2'-O-Methyl nucleoside"
  modified_base 7: mod_base = OTHER; note = "2'-O-Methyl nucleoside"
  modified_base 9: mod_base = OTHER; note = "2'-O-Methyl nucleoside"
  modified_base 11: mod_base = OTHER; note = "2'-O-Methyl nucleoside"
  modified_base 13: mod_base = OTHER; note = "2'-O-Methyl nucleoside"
  modified_base 15: mod_base = OTHER; note = "2'-O-Methyl nucleoside"
  modified_base 17: mod_base = OTHER; note = "2'-O-Methyl nucleoside"
  modified_base 19: mod_base = OTHER; note = "2'-O-Methyl nucleoside"
  modified_base 21: mod_base = OTHER; note = "2'-O-Methyl nucleoside"
  modified_base 23..26: mod_base = OTHER; note = "2'-O-Methyl nucleoside"
  modified_base 2..3: mod_base = OTHER; note = "phosphorothioate linked nucleoside"
  modified_base 23..24: mod_base = OTHER; note = "phosphorothioate linked nucleoside"
  source 1..26: mol_type = other RNA
ttgaacaaatggcactagtaaactat

SEQ ID NO: 354 - RNA, 26 nt, synthetic construct
  misc_feature 1..26: note = HBV RNAi trigger antisense strand
  modified_base 2: mod_base = OTHER; note = "2'-deoxy-3'-fluoro nucleoside"
  modified_base 4: mod_base = OTHER; note = "2'-deoxy-3'-fluoro nucleoside"
  modified_base 6: mod_base = OTHER; note = "2'-deoxy-3'-fluoro nucleoside"
  modified_base 8: mod_base = OTHER; note = "2'-deoxy-3'-fluoro nucleoside"
  modified_base 10: mod_base = OTHER; note = "2'-deoxy-3'-fluoro nucleoside"
  modified_base 12: mod_base = OTHER; note = "2'-deoxy-3'-fluoro nucleoside"
  modified_base 14: mod_base = OTHER; note = "2'-deoxy-3'-fluoro nucleoside"
  modified_base 16: mod_base = OTHER; note = "2'-deoxy-3'-fluoro nucleoside"
  modified_base 18: mod_base = OTHER; note = "2'-deoxy-3'-fluoro nucleoside"
  modified_base 20: mod_base = OTHER; note = "2'-deoxy-3'-fluoro nucleoside"
  modified_base 22: mod_base = OTHER; note = "2'-deoxy-3'-fluoro nucleoside"
  modified_base 1: mod_base = OTHER; note = "2'-O-Methyl nucleoside"
  modified_base 3: mod_base = OTHER; note = "2'-O-Methyl nucleoside"
  modified_base 5: mod_base = OTHER; note = "2'-O-Methyl nucleoside"
  modified_base 7: mod_base = OTHER; note = "2'-O-Methyl nucleoside"
  modified_base 9: mod_base = OTHER; note = "2'-O-Methyl nucleoside"
  modified_base 11: mod_base = OTHER; note = "2'-O-Methyl nucleoside"
  modified_base 13: mod_base = OTHER; note = "2'-O-Methyl nucleoside"
  modified_base 15: mod_base = OTHER; note = "2'-O-Methyl nucleoside"
  modified_base 17: mod_base = OTHER; note = "2'-O-Methyl nucleoside"
  modified_base 19: mod_base = OTHER; note = "2'-O-Methyl nucleoside"
  modified_base 21: mod_base = OTHER; note = "2'-O-Methyl nucleoside"
  modified_base 23..26: mod_base = OTHER; note = "2'-O-Methyl nucleoside"
  modified_base 2..3: mod_base = OTHER; note = "phosphorothioate linked nucleoside"
  modified_base 23..24: mod_base = OTHER; note = "phosphorothioate linked nucleoside"
  source 1..26: mol_type = other RNA
actgaacaaatggcactagtaaatat

SEQ ID NO: 355 - RNA, 26 nt, synthetic construct
  misc_feature 1..26: note = HBV RNAi trigger antisense strand
  modified_base 2: mod_base = OTHER; note = "2'-deoxy-3'-fluoro nucleoside"
  modified_base 4: mod_base = OTHER; note = "2'-deoxy-3'-fluoro nucleoside"
  modified_base 6: mod_base = OTHER; note = "2'-deoxy-3'-fluoro nucleoside"
  modified_base 8: mod_base = OTHER; note = "2'-deoxy-3'-fluoro nucleoside"
  modified_base 10: mod_base = OTHER; note = "2'-deoxy-3'-fluoro nucleoside"
  modified_base 12: mod_base = OTHER; note = "2'-deoxy-3'-fluoro nucleoside"
  modified_base 14: mod_base = OTHER; note = "2'-deoxy-3'-fluoro nucleoside"
  modified_base 16: mod_base = OTHER; note = "2'-deoxy-3'-fluoro nucleoside"
  modified_base 18: mod_base = OTHER; note = "2'-deoxy-3'-fluoro nucleoside"
  modified_base 20: mod_base = OTHER; note = "2'-deoxy-3'-fluoro nucleoside"
  modified_base 22: mod_base = OTHER; note = "2'-deoxy-3'-fluoro nucleoside"
  modified_base 1: mod_base = OTHER; note = "2'-O-Methyl nucleoside"
  modified_base 3: mod_base = OTHER; note = "2'-O-Methyl nucleoside"
  modified_base 5: mod_base = OTHER; note = "2'-O-Methyl nucleoside"
  modified_base 7: mod_base = OTHER; note = "2'-O-Methyl nucleoside"
  modified_base 9: mod_base = OTHER; note = "2'-O-Methyl nucleoside"
  modified_base 11: mod_base = OTHER; note = "2'-O-Methyl nucleoside"
  modified_base 13: mod_base = OTHER; note = "2'-O-Methyl nucleoside"
  modified_base 15: mod_base = OTHER; note = "2'-O-Methyl nucleoside"
  modified_base 17: mod_base = OTHER; note = "2'-O-Methyl nucleoside"
  modified_base 19: mod_base = OTHER; note = "2'-O-Methyl nucleoside"
  modified_base 21: mod_base = OTHER; note = "2'-O-Methyl nucleoside"
  modified_base 23..26: mod_base = OTHER; note = "2'-O-Methyl nucleoside"
  modified_base 2..3: mod_base = OTHER; note = "phosphorothioate linked nucleoside"
  modified_base 23..24: mod_base = OTHER; note = "phosphorothioate linked nucleoside"
  source 1..26: mol_type = other RNA
taaccactgaacaaatggcactatat

SEQ ID NO: 356 - RNA, 26 nt, synthetic construct
  misc_feature 1..26: note = HBV RNAi trigger antisense strand
  modified_base 2: mod_base = OTHER; note = "2'-deoxy-3'-fluoro nucleoside"
  modified_base 4: mod_base = OTHER; note = "2'-deoxy-3'-fluoro nucleoside"
  modified_base 6: mod_base = OTHER; note = "2'-deoxy-3'-fluoro nucleoside"
  modified_base 8: mod_base = OTHER; note = "2'-deoxy-3'-fluoro nucleoside"
  modified_base 10: mod_base = OTHER; note = "2'-deoxy-3'-fluoro nucleoside"
  modified_base 12: mod_base = OTHER; note = "2'-deoxy-3'-fluoro nucleoside"
  modified_base 14: mod_base = OTHER; note = "2'-deoxy-3'-fluoro nucleoside"
  modified_base 16: mod_base = OTHER; note = "2'-deoxy-3'-fluoro nucleoside"
  modified_base 18: mod_base = OTHER; note = "2'-deoxy-3'-fluoro nucleoside"
  modified_base 20: mod_base = OTHER; note = "2'-deoxy-3'-fluoro nucleoside"
  modified_base 22: mod_base = OTHER; note = "2'-deoxy-3'-fluoro nucleoside"
  modified_base 1: mod_base = OTHER; note = "2'-O-Methyl nucleoside"
  modified_base 3: mod_base = OTHER; note = "2'-O-Methyl nucleoside"
  modified_base 5: mod_base = OTHER; note = "2'-O-Methyl nucleoside"
  modified_base 7: mod_base = OTHER; note = "2'-O-Methyl nucleoside"
  modified_base 9: mod_base = OTHER; note = "2'-O-Methyl nucleoside"
  modified_base 11: mod_base = OTHER; note = "2'-O-Methyl nucleoside"
  modified_base 13: mod_base = OTHER; note = "2'-O-Methyl nucleoside"
  modified_base 15: mod_base = OTHER; note = "2'-O-Methyl nucleoside"
  modified_base 17: mod_base = OTHER; note = "2'-O-Methyl nucleoside"
  modified_base 19: mod_base = OTHER; note = "2'-O-Methyl nucleoside"
  modified_base 21: mod_base = OTHER; note = "2'-O-Methyl nucleoside"
  modified_base 23..26: mod_base = OTHER; note = "2'-O-Methyl nucleoside"
  modified_base 2..3: mod_base = OTHER; note = "phosphorothioate linked nucleoside"
  modified_base 23..24: mod_base = OTHER; note = "phosphorothioate linked nucleoside"
  source 1..26: mol_type = other RNA
tgaaccactgaacaaatggcacttat

SEQ ID NO: 357 - RNA, 26 nt, synthetic construct
  misc_feature 1..26: note = HBV RNAi trigger antisense strand
  modified_base 2: mod_base = OTHER; note = "2'-deoxy-3'-fluoro nucleoside"
  modified_base 4: mod_base = OTHER; note = "2'-deoxy-3'-fluoro nucleoside"
  modified_base 6: mod_base = OTHER; note = "2'-deoxy-3'-fluoro nucleoside"
  modified_base 8: mod_base = OTHER; note = "2'-deoxy-3'-fluoro nucleoside"
  modified_base 10: mod_base = OTHER; note = "2'-deoxy-3'-fluoro nucleoside"
  modified_base 12: mod_base = OTHER; note = "2'-deoxy-3'-fluoro nucleoside"
  modified_base 14: mod_base = OTHER; note = "2'-deoxy-3'-fluoro nucleoside"
  modified_base 16: mod_base = OTHER; note = "2'-deoxy-3'-fluoro nucleoside"
  modified_base 18: mod_base = OTHER; note = "2'-deoxy-3'-fluoro nucleoside"
  modified_base 20: mod_base = OTHER; note = "2'-deoxy-3'-fluoro nucleoside"
  modified_base 22: mod_base = OTHER; note = "2'-deoxy-3'-fluoro nucleoside"
  modified_base 1: mod_base = OTHER; note = "2'-O-Methyl nucleoside"
  modified_base 3: mod_base = OTHER; note = "2'-O-Methyl nucleoside"
  modified_base 5: mod_base = OTHER; note = "2'-O-Methyl nucleoside"
  modified_base 7: mod_base = OTHER; note = "2'-O-Methyl nucleoside"
  modified_base 9: mod_base = OTHER; note = "2'-O-Methyl nucleoside"
  modified_base 11: mod_base = OTHER; note = "2'-O-Methyl nucleoside"
  modified_base 13: mod_base = OTHER; note = "2'-O-Methyl nucleoside"
  modified_base 15: mod_base = OTHER; note = "2'-O-Methyl nucleoside"
  modified_base 17: mod_base = OTHER; note = "2'-O-Methyl nucleoside"
  modified_base 19: mod_base = OTHER; note = "2'-O-Methyl nucleoside"
  modified_base 21: mod_base = OTHER; note = "2'-O-Methyl nucleoside"
  modified_base 23..26: mod_base = OTHER; note = "2'-O-Methyl nucleoside"
  modified_base 2..3: mod_base = OTHER; note = "phosphorothioate linked nucleoside"
  modified_base 23..24: mod_base = OTHER; note = "phosphorothioate linked nucleoside"
  source 1..26: mol_type = other RNA
tcgaaccactgaacaaatggcactat

SEQ ID NO: 358 - RNA, 26 nt, synthetic construct
  misc_feature 1..26: note = HBV RNAi trigger antisense strand
  modified_base 2: mod_base = OTHER; note = "2'-deoxy-3'-fluoro nucleoside"
  modified_base 4: mod_base = OTHER; note = "2'-deoxy-3'-fluoro nucleoside"
  modified_base 6: mod_base = OTHER; note = "2'-deoxy-3'-fluoro nucleoside"
  modified_base 8: mod_base = OTHER; note = "2'-deoxy-3'-fluoro nucleoside"
  modified_base 10: mod_base = OTHER; note = "2'-deoxy-3'-fluoro nucleoside"
  modified_base 12: mod_base = OTHER; note = "2'-deoxy-3'-fluoro nucleoside"
  modified_base 14: mod_base = OTHER; note = "2'-deoxy-3'-fluoro nucleoside"
  modified_base 16: mod_base = OTHER; note = "2'-deoxy-3'-fluoro nucleoside"
  modified_base 18: mod_base = OTHER; note = "2'-deoxy-3'-fluoro nucleoside"
  modified_base 20: mod_base = OTHER; note = "2'-deoxy-3'-fluoro nucleoside"
  modified_base 22: mod_base = OTHER; note = "2'-deoxy-3'-fluoro nucleoside"
  modified_base 1: mod_base = OTHER; note = "2'-O-Methyl nucleoside"
  modified_base 3: mod_base = OTHER; note = "2'-O-Methyl nucleoside"
  modified_base 5: mod_base = OTHER; note = "2'-O-Methyl nucleoside"
  modified_base 7: mod_base = OTHER; note = "2'-O-Methyl nucleoside"
  modified_base 9: mod_base = OTHER; note = "2'-O-Methyl nucleoside"
  modified_base 11: mod_base = OTHER; note = "2'-O-Methyl nucleoside"
  modified_base 13: mod_base = OTHER; note = "2'-O-Methyl nucleoside"
  modified_base 15: mod_base = OTHER; note = "2'-O-Methyl nucleoside"
  modified_base 17: mod_base = OTHER; note = "2'-O-Methyl nucleoside"
  modified_base 19: mod_base = OTHER; note = "2'-O-Methyl nucleoside"
  modified_base 21: mod_base = OTHER; note = "2'-O-Methyl nucleoside"
  modified_base 23..26: mod_base = OTHER; note = "2'-O-Methyl nucleoside"
  modified_base 2..3: mod_base = OTHER; note = "phosphorothioate linked nucleoside"
  modified_base 23..24: mod_base = OTHER; note = "phosphorothioate linked nucleoside"
  source 1..26: mol_type = other RNA
tcagaggtgaaaaagttgcatggtat

SEQ ID NO: 359 - RNA, 26 nt, synthetic construct
  misc_feature 1..26: note = HBV RNAi trigger antisense strand
  modified_base 2: mod_base = OTHER; note = "2'-deoxy-3'-fluoro nucleoside"
  modified_base 4: mod_base = OTHER; note = "2'-deoxy-3'-fluoro nucleoside"
  modified_base 6: mod_base = OTHER; note = "2'-deoxy-3'-fluoro nucleoside"
  modified_base 8: mod_base = OTHER; note = "2'-deoxy-3'-fluoro nucleoside"
  modified_base 10: mod_base = OTHER; note = "2'-deoxy-3'-fluoro nucleoside"
  modified_base 12: mod_base = OTHER; note = "2'-deoxy-3'-fluoro nucleoside"
  modified_base 14: mod_base = OTHER; note = "2'-deoxy-3'-fluoro nucleoside"
  modified_base 16: mod_base = OTHER; note = "2'-deoxy-3'-fluoro nucleoside"
  modified_base 18: mod_base = OTHER; note = "2'-deoxy-3'-fluoro nucleoside"
  modified_base 20: mod_base = OTHER; note = "2'-deoxy-3'-fluoro nucleoside"
  modified_base 22: mod_base = OTHER; note = "2'-deoxy-3'-fluoro nucleoside"
  modified_base 1: mod_base = OTHER; note = "2'-O-Methyl nucleoside"
  modified_base 3: mod_base = OTHER; note = "2'-O-Methyl nucleoside"
  modified_base 5: mod_base = OTHER; note = "2'-O-Methyl nucleoside"
  modified_base 7: mod_base = OTHER; note = "2'-O-Methyl nucleoside"
  modified_base 9: mod_base = OTHER; note = "2'-O-Methyl nucleoside"
  modified_base 11: mod_base = OTHER; note = "2'-O-Methyl nucleoside"
  modified_base 13: mod_base = OTHER; note = "2'-O-Methyl nucleoside"
  modified_base 15: mod_base = OTHER; note = "2'-O-Methyl nucleoside"
  modified_base 17: mod_base = OTHER; note = "2'-O-Methyl nucleoside"
  modified_base 19: mod_base = OTHER; note = "2'-O-Methyl nucleoside"
  modified_base 21: mod_base = OTHER; note = "2'-O-Methyl nucleoside"
  modified_base 23..26: mod_base = OTHER; note = "2'-O-Methyl nucleoside"
  modified_base 2..3: mod_base = OTHER; note = "phosphorothioate linked nucleoside"
  modified_base 23..24: mod_base = OTHER; note = "phosphorothioate linked nucleoside"
  source 1..26: mol_type = other RNA
tgcagaggtgaaaaagttgcatgtat

SEQ ID NO: 360 - RNA, 26 nt, synthetic construct
  misc_feature 1..26: note = HBV RNAi trigger antisense strand
  modified_base 2: mod_base = OTHER; note = "2'-deoxy-3'-fluoro nucleoside"
  modified_base 4: mod_base = OTHER; note = "2'-deoxy-3'-fluoro nucleoside"
  modified_base 6: mod_base = OTHER; note = "2'-deoxy-3'-fluoro nucleoside"
  modified_base 8: mod_base = OTHER; note = "2'-deoxy-3'-fluoro nucleoside"
  modified_base 10: mod_base = OTHER; note = "2'-deoxy-3'-fluoro nucleoside"
  modified_base 12: mod_base = OTHER; note = "2'-deoxy-3'-fluoro nucleoside"
  modified_base 14: mod_base = OTHER; note = "2'-deoxy-3'-fluoro nucleoside"
  modified_base 16: mod_base = OTHER; note = "2'-deoxy-3'-fluoro nucleoside"
  modified_base 18: mod_base = OTHER; note = "2'-deoxy-3'-fluoro nucleoside"
  modified_base 20: mod_base = OTHER; note = "2'-deoxy-3'-fluoro nucleoside"
  modified_base 22: mod_base = OTHER; note = "2'-deoxy-3'-fluoro nucleoside"
  modified_base 1: mod_base = OTHER; note = "2'-O-Methyl nucleoside"
  modified_base 3: mod_base = OTHER; note = "2'-O-Methyl nucleoside"
  modified_base 5: mod_base = OTHER; note = "2'-O-Methyl nucleoside"
  modified_base 7: mod_base = OTHER; note = "2'-O-Methyl nucleoside"
  modified_base 9: mod_base = OTHER; note = "2'-O-Methyl nucleoside"
  modified_base 11: mod_base = OTHER; note = "2'-O-Methyl nucleoside"
  modified_base 13: mod_base = OTHER; note = "2'-O-Methyl nucleoside"
  modified_base 15: mod_base = OTHER; note = "2'-O-Methyl nucleoside"
  modified_base 17: mod_base = OTHER; note = "2'-O-Methyl nucleoside"
  modified_base 19: mod_base = OTHER; note = "2'-O-Methyl nucleoside"
  modified_base 21: mod_base = OTHER; note = "2'-O-Methyl nucleoside"
  modified_base 23..26: mod_base = OTHER; note = "2'-O-Methyl nucleoside"
  modified_base 2..3: mod_base = OTHER; note = "phosphorothioate linked nucleoside"
  modified_base 23..24: mod_base = OTHER; note = "phosphorothioate linked nucleoside"
  source 1..26: mol_type = other RNA
tgatgattaggcagaggtgaaaatat

SEQ ID NO: 361 - RNA, 26 nt, synthetic construct
  misc_feature 1..26: note = HBV RNAi trigger antisense strand
  modified_base 2: mod_base = OTHER; note = "2'-deoxy-3'-fluoro nucleoside"
  modified_base 4: mod_base = OTHER; note = "2'-deoxy-3'-fluoro nucleoside"
  modified_base 6: mod_base = OTHER; note = "2'-deoxy-3'-fluoro nucleoside"
  modified_base 8: mod_base = OTHER; note = "2'-deoxy-3'-fluoro nucleoside"
  modified_base 10: mod_base = OTHER; note = "2'-deoxy-3'-fluoro nucleoside"
  modified_base 12: mod_base = OTHER; note = "2'-deoxy-3'-fluoro nucleoside"
  modified_base 14: mod_base = OTHER; note = "2'-deoxy-3'-fluoro nucleoside"
  modified_base 16: mod_base = OTHER; note = "2'-deoxy-3'-fluoro nucleoside"
  modified_base 18: mod_base = OTHER; note = "2'-deoxy-3'-fluoro nucleoside"
  modified_base 20: mod_base = OTHER; note = "2'-deoxy-3'-fluoro nucleoside"
  modified_base 22: mod_base = OTHER; note = "2'-deoxy-3'-fluoro nucleoside"
  modified_base 1: mod_base = OTHER; note = "2'-O-Methyl nucleoside"
  modified_base 3: mod_base = OTHER; note = "2'-O-Methyl nucleoside"
  modified_base 5: mod_base = OTHER; note = "2'-O-Methyl nucleoside"
  modified_base 7: mod_base = OTHER; note = "2'-O-Methyl nucleoside"
  modified_base 9: mod_base = OTHER; note = "2'-O-Methyl nucleoside"
  modified_base 11: mod_base = OTHER; note = "2'-O-Methyl nucleoside"
  modified_base 13: mod_base = OTHER; note = "2'-O-Methyl nucleoside"
  modified_base 15: mod_base = OTHER; note = "2'-O-Methyl nucleoside"
  modified_base 17: mod_base = OTHER; note = "2'-O-Methyl nucleoside"
  modified_base 19: mod_base = OTHER; note = "2'-O-Methyl nucleoside"
  modified_base 21: mod_base = OTHER; note = "2'-O-Methyl nucleoside"
  modified_base 23..26: mod_base = OTHER; note = "2'-O-Methyl nucleoside"
  modified_base 2..3: mod_base = OTHER; note = "phosphorothioate linked nucleoside"
  modified_base 23..24: mod_base = OTHER; note = "phosphorothioate linked nucleoside"
  source 1..26: mol_type = other RNA
tgagatgattaggcagaggtgaatat

SEQ ID NO: 362 - RNA, 26 nt, synthetic construct
  misc_feature 1..26: note = HBV RNAi trigger antisense strand
  modified_base 2: mod_base = OTHER; note = "2'-deoxy-3'-fluoro nucleoside"
  modified_base 4: mod_base = OTHER; note = "2'-deoxy-3'-fluoro nucleoside"
  modified_base 6: mod_base = OTHER; note = "2'-deoxy-3'-fluoro nucleoside"
  modified_base 8: mod_base = OTHER; note = "2'-deoxy-3'-fluoro nucleoside"
  modified_base 10: mod_base = OTHER; note = "2'-deoxy-3'-fluoro nucleoside"
  modified_base 12: mod_base = OTHER; note = "2'-deoxy-3'-fluoro nucleoside"
  modified_base 14: mod_base = OTHER; note = "2'-deoxy-3'-fluoro nucleoside"
  modified_base 16: mod_base = OTHER; note = "2'-deoxy-3'-fluoro nucleoside"
  modified_base 18: mod_base = OTHER; note = "2'-deoxy-3'-fluoro nucleoside"
  modified_base 20: mod_base = OTHER; note = "2'-deoxy-3'-fluoro nucleoside"
  modified_base 22: mod_base = OTHER; note = "2'-deoxy-3'-fluoro nucleoside"
  modified_base 1: mod_base = OTHER; note = "2'-O-Methyl nucleoside"
  modified_base 3: mod_base = OTHER; note = "2'-O-Methyl nucleoside"
  modified_base 5: mod_base = OTHER; note = "2'-O-Methyl nucleoside"
  modified_base 7: mod_base = OTHER; note = "2'-O-Methyl nucleoside"
  modified_base 9: mod_base = OTHER; note = "2'-O-Methyl nucleoside"
  modified_base 11: mod_base = OTHER; note = "2'-O-Methyl nucleoside"
  modified_base 13: mod_base = OTHER; note = "2'-O-Methyl nucleoside"
  modified_base 15: mod_base = OTHER; note = "2'-O-Methyl nucleoside"
  modified_base 17: mod_base = OTHER; note = "2'-O-Methyl nucleoside"
  modified_base 19: mod_base = OTHER; note = "2'-O-Methyl nucleoside"
  modified_base 21: mod_base = OTHER; note = "2'-O-Methyl nucleoside"
  modified_base 23..26: mod_base = OTHER; note = "2'-O-Methyl nucleoside"
  modified_base 2..3: mod_base = OTHER; note = "phosphorothioate linked nucleoside"
  modified_base 23..24: mod_base = OTHER; note = "phosphorothioate linked nucleoside"
  source 1..26: mol_type = other RNA
tcacgagtctagactctgtggtatat

SEQ ID NO: 363 - RNA, 26 nt, synthetic construct
  misc_feature 1..26: note = HBV RNAi trigger antisense strand
  modified_base 2: mod_base = OTHER; note = "2'-deoxy-3'-fluoro nucleoside"
  modified_base 4: mod_base = OTHER; note = "2'-deoxy-3'-fluoro nucleoside"
  modified_base 6: mod_base = OTHER; note = "2'-deoxy-3'-fluoro nucleoside"
  modified_base 8: mod_base = OTHER; note = "2'-deoxy-3'-fluoro nucleoside"
  modified_base 10: mod_base = OTHER; note = "2'-deoxy-3'-fluoro nucleoside"
  modified_base 12: mod_base = OTHER; note = "2'-deoxy-3'-fluoro nucleoside"
  modified_base 14: mod_base = OTHER; note = "2'-deoxy-3'-fluoro nucleoside"
  modified_base 16: mod_base = OTHER; note = "2'-deoxy-3'-fluoro nucleoside"
  modified_base 18: mod_base = OTHER; note = "2'-deoxy-3'-fluoro nucleoside"
  modified_base 20: mod_base = OTHER; note = "2'-deoxy-3'-fluoro nucleoside"
  modified_base 22: mod_base = OTHER; note = "2'-deoxy-3'-fluoro nucleoside"
  modified_base 1: mod_base = OTHER; note = "2'-O-Methyl nucleoside"
  modified_base 3: mod_base = OTHER; note = "2'-O-Methyl nucleoside"
  modified_base 5: mod_base = OTHER; note = "2'-O-Methyl nucleoside"
  modified_base 7: mod_base = OTHER; note = "2'-O-Methyl nucleoside"
  modified_base 9: mod_base = OTHER; note = "2'-O-Methyl nucleoside"
  modified_base 11: mod_base = OTHER; note = "2'-O-Methyl nucleoside"
  modified_base 13: mod_base = OTHER; note = "2'-O-Methyl nucleoside"
  modified_base 15: mod_base = OTHER; note = "2'-O-Methyl nucleoside"
  modified_base 17: mod_base = OTHER; note = "2'-O-Methyl nucleoside"
  modified_base 19: mod_base = OTHER; note = "2'-O-Methyl nucleoside"
  modified_base 21: mod_base = OTHER; note = "2'-O-Methyl nucleoside"
  modified_base 23..26: mod_base = OTHER; note = "2'-O-Methyl nucleoside"
  modified_base 2..3: mod_base = OTHER; note = "phosphorothioate linked nucleoside"
  modified_base 23..24: mod_base = OTHER; note = "phosphorothioate linked nucleoside"
  source 1..26: mol_type = other RNA
attgagagaagtccaccacgagttat

SEQ ID NO: 364 - RNA, 26 nt, synthetic construct
  misc_feature 1..26: note = HBV RNAi trigger antisense strand
  modified_base 2: mod_base = OTHER; note = "2'-deoxy-3'-fluoro nucleoside"
  modified_base 4: mod_base = OTHER; note = "2'-deoxy-3'-fluoro nucleoside"
  modified_base 6: mod_base = OTHER; note = "2'-deoxy-3'-fluoro nucleoside"
  modified_base 8: mod_base = OTHER; note = "2'-deoxy-3'-fluoro nucleoside"
  modified_base 10: mod_base = OTHER; note = "2'-deoxy-3'-fluoro nucleoside"
  modified_base 12: mod_base = OTHER; note = "2'-deoxy-3'-fluoro nucleoside"
  modified_base 14: mod_base = OTHER; note = "2'-deoxy-3'-fluoro nucleoside"
  modified_base 16: mod_base = OTHER; note = "2'-deoxy-3'-fluoro nucleoside"
  modified_base 18: mod_base = OTHER; note = "2'-deoxy-3'-fluoro nucleoside"
  modified_base 20: mod_base = OTHER; note = "2'-deoxy-3'-fluoro nucleoside"
  modified_base 22: mod_base = OTHER; note = "2'-deoxy-3'-fluoro nucleoside"
  modified_base 1: mod_base = OTHER; note = "2'-O-Methyl nucleoside"
  modified_base 3: mod_base = OTHER; note = "2'-O-Methyl nucleoside"
  modified_base 5: mod_base = OTHER; note = "2'-O-Methyl nucleoside"
  modified_base 7: mod_base = OTHER; note = "2'-O-Methyl nucleoside"
  modified_base 9: mod_base = OTHER; note = "2'-O-Methyl nucleoside"
  modified_base 11: mod_base = OTHER; note = "2'-O-Methyl nucleoside"
  modified_base 13: mod_base = OTHER; note = "2'-O-Methyl nucleoside"
  modified_base 15: mod_base = OTHER; note = "2'-O-Methyl nucleoside"
  modified_base 17: mod_base = OTHER; note = "2'-O-Methyl nucleoside"
  modified_base 19: mod_base = OTHER; note = "2'-O-Methyl nucleoside"
  modified_base 21: mod_base = OTHER; note = "2'-O-Methyl nucleoside"
  modified_base 23..26: mod_base = OTHER; note = "2'-O-Methyl nucleoside"
  modified_base 2..3: mod_base = OTHER; note = "phosphorothioate linked nucleoside"
  modified_base 23..24: mod_base = OTHER; note = "phosphorothioate linked nucleoside"
  source 1..26: mol_type = other RNA
aattgagagaagtccaccacgagtat

SEQ ID NO: 365 - RNA, 26 nt, synthetic construct
  misc_feature 1..26: note = HBV RNAi trigger antisense strand
  modified_base 2: mod_base = OTHER; note = "2'-deoxy-3'-fluoro nucleoside"
  modified_base 4: mod_base = OTHER; note = "2'-deoxy-3'-fluoro nucleoside"
  modified_base 6: mod_base = OTHER; note = "2'-deoxy-3'-fluoro nucleoside"
  modified_base 8: mod_base = OTHER; note = "2'-deoxy-3'-fluoro nucleoside"
  modified_base 10: mod_base = OTHER; note = "2'-deoxy-3'-fluoro nucleoside"
  modified_base 12: mod_base = OTHER; note = "2'-deoxy-3'-fluoro nucleoside"
  modified_base 14: mod_base = OTHER; note = "2'-deoxy-3'-fluoro nucleoside"
  modified_base 16: mod_base = OTHER; note = "2'-deoxy-3'-fluoro nucleoside"
  modified_base 18: mod_base = OTHER; note = "2'-deoxy-3'-fluoro nucleoside"
  modified_base 20: mod_base = OTHER; note = "2'-deoxy-3'-fluoro nucleoside"
  modified_base 22: mod_base = OTHER; note = "2'-deoxy-3'-fluoro nucleoside"
  modified_base 1: mod_base = OTHER; note = "2'-O-Methyl nucleoside"
  modified_base 3: mod_base = OTHER; note = "2'-O-Methyl nucleoside"
  modified_base 5: mod_base = OTHER; note = "2'-O-Methyl nucleoside"
  modified_base 7: mod_base = OTHER; note = "2'-O-Methyl nucleoside"
  modified_base 9: mod_base = OTHER; note = "2'-O-Methyl nucleoside"
  modified_base 11: mod_base = OTHER; note = "2'-O-Methyl nucleoside"
  modified_base 13: mod_base = OTHER; note = "2'-O-Methyl nucleoside"
  modified_base 15: mod_base = OTHER; note = "2'-O-Methyl nucleoside"
  modified_base 17: mod_base = OTHER; note = "2'-O-Methyl nucleoside"
  modified_base 19: mod_base = OTHER; note = "2'-O-Methyl nucleoside"
  modified_base 21: mod_base = OTHER; note = "2'-O-Methyl nucleoside"
  modified_base 23..26: mod_base = OTHER; note = "2'-O-Methyl nucleoside"
  modified_base 2..3: mod_base = OTHER; note = "phosphorothioate linked nucleoside"
  modified_base 23..24: mod_base = OTHER; note = "phosphorothioate linked nucleoside"
  source 1..26: mol_type = other RNA
ttagaaaattgagagaagtccactat

SEQ ID NO: 366 - RNA, 26 nt, synthetic construct
  misc_feature 1..26: note = HBV RNAi trigger antisense strand
  modified_base 2: mod_base = OTHER; note = "2'-deoxy-3'-fluoro nucleoside"
  modified_base 4: mod_base = OTHER; note = "2'-deoxy-3'-fluoro nucleoside"
  modified_base 6: mod_base = OTHER; note = "2'-deoxy-3'-fluoro nucleoside"
  modified_base 8: mod_base = OTHER; note = "2'-deoxy-3'-fluoro nucleoside"
  modified_base 10: mod_base = OTHER; note = "2'-deoxy-3'-fluoro nucleoside"
  modified_base 12: mod_base = OTHER; note = "2'-deoxy-3'-fluoro nucleoside"
  modified_base 14: mod_base = OTHER; note = "2'-deoxy-3'-fluoro nucleoside"
  modified_base 16: mod_base = OTHER; note = "2'-deoxy-3'-fluoro nucleoside"
  modified_base 18: mod_base = OTHER; note = "2'-deoxy-3'-fluoro nucleoside"
  modified_base 20: mod_base = OTHER; note = "2'-deoxy-3'-fluoro nucleoside"
  modified_base 22: mod_base = OTHER; note = "2'-deoxy-3'-fluoro nucleoside"
  modified_base 1: mod_base = OTHER; note = "2'-O-Methyl nucleoside"
  modified_base 3: mod_base = OTHER; note = "2'-O-Methyl nucleoside"
  modified_base 5: mod_base = OTHER; note = "2'-O-Methyl nucleoside"
  modified_base 7: mod_base = OTHER; note = "2'-O-Methyl nucleoside"
  modified_base 9: mod_base = OTHER; note = "2'-O-Methyl nucleoside"
  modified_base 11: mod_base = OTHER; note = "2'-O-Methyl nucleoside"
  modified_base 13: mod_base = OTHER; note = "2'-O-Methyl nucleoside"
  modified_base 15: mod_base = OTHER; note = "2'-O-Methyl nucleoside"
  modified_base 17: mod_base = OTHER; note = "2'-O-Methyl nucleoside"
  modified_base 19: mod_base = OTHER; note = "2'-O-Methyl nucleoside"
  modified_base 21: mod_base = OTHER; note = "2'-O-Methyl nucleoside"
  modified_base 23..26: mod_base = OTHER; note = "2'-O-Methyl nucleoside"
  modified_base 2..3: mod_base = OTHER; note = "phosphorothioate linked nucleoside"
  modified_base 23..24: mod_base = OTHER; note = "phosphorothioate linked nucleoside"
  source 1..26: mol_type = other RNA
tgcgtcagcaaacacttggcacatat

SEQ ID NO: 367 - RNA, 26 nt, synthetic construct
  misc_feature 1..26: note = HBV RNAi trigger antisense strand
  modified_base 2: mod_base = OTHER; note = "2'-deoxy-3'-fluoro nucleoside"
  modified_base 4: mod_base = OTHER; note = "2'-deoxy-3'-fluoro nucleoside"
  modified_base 6: mod_base = OTHER; note = "2'-deoxy-3'-fluoro nucleoside"
  modified_base 8: mod_base = OTHER; note = "2'-deoxy-3'-fluoro nucleoside"
  modified_base 10: mod_base = OTHER; note = "2'-deoxy-3'-fluoro nucleoside"
  modified_base 12: mod_base = OTHER; note = "2'-deoxy-3'-fluoro nucleoside"
  modified_base 14: mod_base = OTHER; note = "2'-deoxy-3'-fluoro nucleoside"
  modified_base 16: mod_base = OTHER; note = "2'-deoxy-3'-fluoro nucleoside"
  modified_base 18: mod_base = OTHER; note = "2'-deoxy-3'-fluoro nucleoside"
  modified_base 20: mod_base = OTHER; note = "2'-deoxy-3'-fluoro nucleoside"
  modified_base 22: mod_base = OTHER; note = "2'-deoxy-3'-fluoro nucleoside"
  modified_base 1: mod_base = OTHER; note = "2'-O-Methyl nucleoside"
  modified_base 3: mod_base = OTHER; note = "2'-O-Methyl nucleoside"
  modified_base 5: mod_base = OTHER; note = "2'-O-Methyl nucleoside"
  modified_base 7: mod_base = OTHER; note = "2'-O-Methyl nucleoside"
  modified_base 9: mod_base = OTHER; note = "2'-O-Methyl nucleoside"
  modified_base 11: mod_base = OTHER; note = "2'-O-Methyl nucleoside"
  modified_base 13: mod_base = OTHER; note = "2'-O-Methyl nucleoside"
  modified_base 15: mod_base = OTHER; note = "2'-O-Methyl nucleoside"
  modified_base 17: mod_base = OTHER; note = "2'-O-Methyl nucleoside"
  modified_base 19: mod_base = OTHER; note = "2'-O-Methyl nucleoside"
  modified_base 21: mod_base = OTHER; note = "2'-O-Methyl nucleoside"
  modified_base 23..26: mod_base = OTHER; note = "2'-O-Methyl nucleoside"
  modified_base 2..3: mod_base = OTHER; note = "phosphorothioate linked nucleoside"
  modified_base 23..24: mod_base = OTHER; note = "phosphorothioate linked nucleoside"
  source 1..26: mol_type = other RNA
ttatggatcggcagaggagccactat

SEQ ID NO: 368 - RNA, 26 nt, synthetic construct
  misc_feature 1..26: note = HBV RNAi trigger antisense strand
  modified_base 2: mod_base = OTHER; note = "2'-deoxy-3'-fluoro nucleoside"
  modified_base 4: mod_base = OTHER; note = "2'-deoxy-3'-fluoro nucleoside"
  modified_base 6: mod_base = OTHER; note = "2'-deoxy-3'-fluoro nucleoside"
  modified_base 8: mod_base = OTHER; note = "2'-deoxy-3'-fluoro nucleoside"
  modified_base 10: mod_base = OTHER; note = "2'-deoxy-3'-fluoro nucleoside"
  modified_base 12: mod_base = OTHER; note = "2'-deoxy-3'-fluoro nucleoside"
  modified_base 14: mod_base = OTHER; note = "2'-deoxy-3'-fluoro nucleoside"
  modified_base 16: mod_base = OTHER; note = "2'-deoxy-3'-fluoro nucleoside"
  modified_base 18: mod_base = OTHER; note = "2'-deoxy-3'-fluoro nucleoside"
  modified_base 20: mod_base = OTHER; note = "2'-deoxy-3'-fluoro nucleoside"
  modified_base 22: mod_base = OTHER; note = "2'-deoxy-3'-fluoro nucleoside"
  modified_base 1: mod_base = OTHER; note = "2'-O-Methyl nucleoside"
  modified_base 3: mod_base = OTHER; note = "2'-O-Methyl nucleoside"
  modified_base 5: mod_base = OTHER; note = "2'-O-Methyl nucleoside"
  modified_base 7: mod_base = OTHER; note = "2'-O-Methyl nucleoside"
  modified_base 9: mod_base = OTHER; note = "2'-O-Methyl nucleoside"
  modified_base 11: mod_base = OTHER; note = "2'-O-Methyl nucleoside"
  modified_base 13: mod_base = OTHER; note = "2'-O-Methyl nucleoside"
  modified_base 15: mod_base = OTHER; note = "2'-O-Methyl nucleoside"
  modified_base 17: mod_base = OTHER; note = "2'-O-Methyl nucleoside"
  modified_base 19: mod_base = OTHER; note = "2'-O-Methyl nucleoside"
  modified_base 21: mod_base = OTHER; note = "2'-O-Methyl nucleoside"
  modified_base 23..26: mod_base = OTHER; note = "2'-O-Methyl nucleoside"
  modified_base 2..3: mod_base = OTHER; note = "phosphorothioate linked nucleoside"
  modified_base 23..24: mod_base = OTHER; note = "phosphorothioate linked nucleoside"
  source 1..26: mol_type = other RNA
tcagtatggatcggcagaggagctat

SEQ ID NO: 369 - RNA, 26 nt, synthetic construct
  misc_feature 1..26: note = HBV RNAi trigger antisense strand
  modified_base 2: mod_base = OTHER; note = "2'-deoxy-3'-fluoro nucleoside"
  modified_base 4: mod_base = OTHER; note = "2'-deoxy-3'-fluoro nucleoside"
  modified_base 6: mod_base = OTHER; note = "2'-deoxy-3'-fluoro nucleoside"
  modified_base 8: mod_base = OTHER; note = "2'-deoxy-3'-fluoro nucleoside"
  modified_base 10: mod_base = OTHER; note = "2'-deoxy-3'-fluoro nucleoside"
  modified_base 12: mod_base = OTHER; note = "2'-deoxy-3'-fluoro nucleoside"
  modified_base 14: mod_base = OTHER; note = "2'-deoxy-3'-fluoro nucleoside"
  modified_base 16: mod_base = OTHER; note = "2'-deoxy-3'-fluoro nucleoside"
  modified_base 18: mod_base = OTHER; note = "2'-deoxy-3'-fluoro nucleoside"
  modified_base 20: mod_base = OTHER; note = "2'-deoxy-3'-fluoro nucleoside"
  modified_base 22: mod_base = OTHER; note = "2'-deoxy-3'-fluoro nucleoside"
  modified_base 1: mod_base = OTHER; note = "2'-O-Methyl nucleoside"
  modified_base 3: mod_base = OTHER; note = "2'-O-Methyl nucleoside"
  modified_base 5: mod_base = OTHER; note = "2'-O-Methyl nucleoside"
  modified_base 7: mod_base = OTHER; note = "2'-O-Methyl nucleoside"
  modified_base 9: mod_base = OTHER; note = "2'-O-Methyl nucleoside"
  modified_base 11: mod_base = OTHER; note = "2'-O-Methyl nucleoside"
  modified_base 13: mod_base = OTHER; note = "2'-O-Methyl nucleoside"
  modified_base 15: mod_base = OTHER; note = "2'-O-Methyl nucleoside"
  modified_base 17: mod_base = OTHER; note = "2'-O-Methyl nucleoside"
  modified_base 19: mod_base = OTHER; note = "2'-O-Methyl nucleoside"
  modified_base 21: mod_base = OTHER; note = "2'-O-Methyl nucleoside"
  modified_base 23..26: mod_base = OTHER; note = "2'-O-Methyl nucleoside"
  modified_base 2..3: mod_base = OTHER; note = "phosphorothioate linked nucleoside"
  modified_base 23..24: mod_base = OTHER; note = "phosphorothioate linked nucleoside"
  source 1..26: mol_type = other RNA
tggagttccgcagtatggatcggtat

SEQ ID NO: 370 - RNA, 23 nt, synthetic construct
  misc_feature 1..23: note = HBV RNAi trigger antisense strand
  modified_base 2: mod_base = OTHER; note = "2'-deoxy-3'-fluoro nucleoside"
  modified_base 4: mod_base = OTHER; note = "2'-deoxy-3'-fluoro nucleoside"
  modified_base 6: mod_base = OTHER; note = "2'-deoxy-3'-fluoro nucleoside"
  modified_base 8: mod_base = OTHER; note = "2'-deoxy-3'-fluoro nucleoside"
  modified_base 10: mod_base = OTHER; note = "2'-deoxy-3'-fluoro nucleoside"
  modified_base 12: mod_base = OTHER; note = "2'-deoxy-3'-fluoro nucleoside"
  modified_base 14: mod_base = OTHER; note = "2'-deoxy-3'-fluoro nucleoside"
  modified_base 16: mod_base = OTHER; note = "2'-deoxy-3'-fluoro nucleoside"
  modified_base 18: mod_base = OTHER; note = "2'-deoxy-3'-fluoro nucleoside"
  modified_base 20: mod_base = OTHER; note = "2'-deoxy-3'-fluoro nucleoside"
  modified_base 1: mod_base = OTHER; note = "2'-O-Methyl nucleoside"
  modified_base 3: mod_base = OTHER; note = "2'-O-Methyl nucleoside"
  modified_base 5: mod_base = OTHER; note = "2'-O-Methyl nucleoside"
  modified_base 7: mod_base = OTHER; note = "2'-O-Methyl nucleoside"
  modified_base 9: mod_base = OTHER; note = "2'-O-Methyl nucleoside"
  modified_base 11: mod_base = OTHER; note = "2'-O-Methyl nucleoside"
  modified_base 13: mod_base = OTHER; note = "2'-O-Methyl nucleoside"
  modified_base 15: mod_base = OTHER; note = "2'-O-Methyl nucleoside"
  modified_base 17: mod_base = OTHER; note = "2'-O-Methyl nucleoside"
  modified_base 19: mod_base = OTHER; note = "2'-O-Methyl nucleoside"
  modified_base 21..23: mod_base = OTHER; note = "2'-O-Methyl nucleoside"
  modified_base 2..3: mod_base = OTHER; note = "phosphorothioate linked nucleoside"
  modified_base 22..23: mod_base = OTHER; note = "phosphorothioate linked nucleoside"
  source 1..23: mol_type = other RNA
taccaatttatgcctacaggcct

SEQ ID NO: 371 - RNA, 23 nt, synthetic construct
  misc_feature 1..23: note = HBV RNAi trigger antisense strand
  modified_base 2: mod_base = OTHER; note = "2'-deoxy-3'-fluoro nucleoside"
  modified_base 4: mod_base = OTHER; note = "2'-deoxy-3'-fluoro nucleoside"
  modified_base 6: mod_base = OTHER; note = "2'-deoxy-3'-fluoro nucleoside"
  modified_base 8: mod_base = OTHER; note = "2'-deoxy-3'-fluoro nucleoside"
  modified_base 10: mod_base = OTHER; note = "2'-deoxy-3'-fluoro nucleoside"
  modified_base 12: mod_base = OTHER; note = "2'-deoxy-3'-fluoro nucleoside"
  modified_base 14: mod_base = OTHER; note = "2'-deoxy-3'-fluoro nucleoside"
  modified_base 16: mod_base = OTHER; note = "2'-deoxy-3'-fluoro nucleoside"
  modified_base 18: mod_base = OTHER; note = "2'-deoxy-3'-fluoro nucleoside"
  modified_base 20: mod_base = OTHER; note = "2'-deoxy-3'-fluoro nucleoside"
  modified_base 1: mod_base = OTHER; note = "2'-O-Methyl nucleoside"
  modified_base 3: mod_base = OTHER; note = "2'-O-Methyl nucleoside"
  modified_base 5: mod_base = OTHER; note = "2'-O-Methyl nucleoside"
  modified_base 7: mod_base = OTHER; note = "2'-O-Methyl nucleoside"
  modified_base 9: mod_base = OTHER; note = "2'-O-Methyl nucleoside"
  modified_base 11: mod_base = OTHER; note = "2'-O-Methyl nucleoside"
  modified_base 13: mod_base = OTHER; note = "2'-O-Methyl nucleoside"
  modified_base 15: mod_base = OTHER; note = "2'-O-Methyl nucleoside"
  modified_base 17: mod_base = OTHER; note = "2'-O-Methyl nucleoside"
  modified_base 19: mod_base = OTHER; note = "2'-O-Methyl nucleoside"
  modified_base 21..23: mod_base = OTHER; note = "2'-O-Methyl nucleoside"
  modified_base 2..4: mod_base = OTHER; note = "phosphorothioate linked nucleoside"
  modified_base 23: mod_base = OTHER; note = "phosphorothioate linked nucleoside"
  source 1..23: mol_type = other RNA
taccaatttatgcctacaggcct

SEQ ID NO: 372 - RNA, 21 nt, synthetic construct
  misc_feature 1..21: note = HBV RNAi trigger antisense strand
  modified_base 2: mod_base = OTHER; note = "2'-deoxy-3'-fluoro nucleoside"
  modified_base 4: mod_base = OTHER; note = "2'-deoxy-3'-fluoro nucleoside"
  modified_base 6: mod_base = OTHER; note = "2'-deoxy-3'-fluoro nucleoside"
  modified_base 8: mod_base = OTHER; note = "2'-deoxy-3'-fluoro nucleoside"
  modified_base 10: mod_base = OTHER; note = "2'-deoxy-3'-fluoro nucleoside"
  modified_base 12: mod_base = OTHER; note = "2'-deoxy-3'-fluoro nucleoside"
  modified_base 14: mod_base = OTHER; note = "2'-deoxy-3'-fluoro nucleoside"
  modified_base 16: mod_base = OTHER; note = "2'-deoxy-3'-fluoro nucleoside"
  modified_base 18: mod_base = OTHER; note = "2'-deoxy-3'-fluoro nucleoside"
  modified_base 20: mod_base = OTHER; note = "2'-deoxy-3'-fluoro nucleoside"
  modified_base 1: mod_base = OTHER; note = "2'-O-Methyl nucleoside"
  modified_base 3: mod_base = OTHER; note = "2'-O-Methyl nucleoside"
  modified_base 5: mod_base = OTHER; note = "2'-O-Methyl nucleoside"
  modified_base 7: mod_base = OTHER; note = "2'-O-Methyl nucleoside"
  modified_base 9: mod_base = OTHER; note = "2'-O-Methyl nucleoside"
  modified_base 11: mod_base = OTHER; note = "2'-O-Methyl nucleoside"
  modified_base 13: mod_base = OTHER; note = "2'-O-Methyl nucleoside"
  modified_base 15: mod_base = OTHER; note = "2'-O-Methyl nucleoside"
  modified_base 17: mod_base = OTHER; note = "2'-O-Methyl nucleoside"
  modified_base 19: mod_base = OTHER; note = "2'-O-Methyl nucleoside"
  modified_base 21: mod_base = OTHER; note = "2'-O-Methyl nucleoside"
  modified_base 2..4: mod_base = OTHER; note = "phosphorothioate linked nucleoside"
  modified_base 21: mod_base = OTHER; note = "phosphorothioate linked nucleoside"
  source 1..21: mol_type = other RNA
taccaatttatgcctacaggc

SEQ ID NO: 373 - RNA, 23 nt, synthetic construct
  misc_feature 1..23: note = HBV RNAi trigger antisense strand
  modified_base 2: mod_base = OTHER; note = "2'-deoxy-3'-fluoro nucleoside"
  modified_base 4: mod_base = OTHER; note = "2'-deoxy-3'-fluoro nucleoside"
  modified_base 6: mod_base = OTHER; note = "2'-deoxy-3'-fluoro nucleoside"
  modified_base 8: mod_base = OTHER; note = "2'-deoxy-3'-fluoro nucleoside"
  modified_base 10: mod_base = OTHER; note = "2'-deoxy-3'-fluoro nucleoside"
  modified_base 12: mod_base = OTHER; note = "2'-deoxy-3'-fluoro nucleoside"
  modified_base 14: mod_base = OTHER; note = "2'-deoxy-3'-fluoro nucleoside"
  modified_base 16: mod_base = OTHER; note = "2'-deoxy-3'-fluoro nucleoside"
  modified_base 18: mod_base = OTHER; note = "2'-deoxy-3'-fluoro nucleoside"
  modified_base 20: mod_base = OTHER; note = "2'-deoxy-3'-fluoro nucleoside"
  modified_base 1: mod_base = OTHER; note = "2'-O-Methyl nucleoside"
  modified_base 3: mod_base = OTHER; note = "2'-O-Methyl nucleoside"
  modified_base 5: mod_base = OTHER; note = "2'-O-Methyl nucleoside"
  modified_base 7: mod_base = OTHER; note = "2'-O-Methyl nucleoside"
  modified_base 9: mod_base = OTHER; note = "2'-O-Methyl nucleoside"
  modified_base 11: mod_base = OTHER; note = "2'-O-Methyl nucleoside"
  modified_base 13: mod_base = OTHER; note = "2'-O-Methyl nucleoside"
  modified_base 15: mod_base = OTHER; note = "2'-O-Methyl nucleoside"
  modified_base 17: mod_base = OTHER; note = "2'-O-Methyl nucleoside"
  modified_base 19: mod_base = OTHER; note = "2'-O-Methyl nucleoside"
  modified_base 21..23: mod_base = OTHER; note = "2'-O-Methyl nucleoside"
  modified_base 2..3: mod_base = OTHER; note = "phosphorothioate linked nucleoside"
  modified_base 22..23: mod_base = OTHER; note = "phosphorothioate linked nucleoside"
  source 1..23: mol_type = other RNA
tgaagcgaagtgcacacggaccg

SEQ ID NO: 374 - RNA, 23 nt, synthetic construct
  misc_feature 1..23: note = HBV RNAi trigger antisense strand
  modified_base 2: mod_base = OTHER; note = "2'-deoxy-3'-fluoro nucleoside"
  modified_base 4: mod_base = OTHER; note = "2'-deoxy-3'-fluoro nucleoside"
  modified_base 6: mod_base = OTHER; note = "2'-deoxy-3'-fluoro nucleoside"
  modified_base 8: mod_base = OTHER; note = "2'-deoxy-3'-fluoro nucleoside"
  modified_base 10: mod_base = OTHER; note = "2'-deoxy-3'-fluoro nucleoside"
  modified_base 12: mod_base = OTHER; note = "2'-deoxy-3'-fluoro nucleoside"
  modified_base 14: mod_base = OTHER; note = "2'-deoxy-3'-fluoro nucleoside"
  modified_base 16: mod_base = OTHER; note = "2'-deoxy-3'-fluoro nucleoside"
  modified_base 18: mod_base = OTHER; note = "2'-deoxy-3'-fluoro nucleoside"
  modified_base 20: mod_base = OTHER; note = "2'-deoxy-3'-fluoro nucleoside"
  modified_base 1: mod_base = OTHER; note = "2'-O-Methyl nucleoside"
  modified_base 3: mod_base = OTHER; note = "2'-O-Methyl nucleoside"
  modified_base 5: mod_base = OTHER; note = "2'-O-Methyl nucleoside"
  modified_base 7: mod_base = OTHER; note = "2'-O-Methyl nucleoside"
  modified_base 9: mod_base = OTHER; note = "2'-O-Methyl nucleoside"
  modified_base 11: mod_base = OTHER; note = "2'-O-Methyl nucleoside"
  modified_base 13: mod_base = OTHER; note = "2'-O-Methyl nucleoside"
  modified_base 15: mod_base = OTHER; note = "2'-O-Methyl nucleoside"
  modified_base 17: mod_base = OTHER; note = "2'-O-Methyl nucleoside"
  modified_base 19: mod_base = OTHER; note = "2'-O-Methyl nucleoside"
  modified_base 21..23: mod_base = OTHER; note = "2'-O-Methyl nucleoside"
  modified_base 2..4: mod_base = OTHER; note = "phosphorothioate linked nucleoside"
  modified_base 23: mod_base = OTHER; note = "phosphorothioate linked nucleoside"
  source 1..23: mol_type = other RNA
tgaagcgaagtgcacacggaccg

SEQ ID NO: 375 - RNA, 21 nt, synthetic construct
  misc_feature 1..21: note = HBV RNAi trigger antisense strand
  modified_base 2: mod_base = OTHER; note = "2'-deoxy-3'-fluoro nucleoside"
  modified_base 4: mod_base = OTHER; note = "2'-deoxy-3'-fluoro nucleoside"
  modified_base 6: mod_base = OTHER; note = "2'-deoxy-3'-fluoro nucleoside"
  modified_base 8: mod_base = OTHER; note = "2'-deoxy-3'-fluoro nucleoside"
  modified_base 10: mod_base = OTHER; note = "2'-deoxy-3'-fluoro nucleoside"
  modified_base 12: mod_base = OTHER; note = "2'-deoxy-3'-fluoro nucleoside"
  modified_base 14: mod_base = OTHER; note = "2'-deoxy-3'-fluoro nucleoside"
  modified_base 16: mod_base = OTHER; note = "2'-deoxy-3'-fluoro nucleoside"
  modified_base 18: mod_base = OTHER; note = "2'-deoxy-3'-fluoro nucleoside"
  modified_base 20: mod_base = OTHER; note = "2'-deoxy-3'-fluoro nucleoside"
  modified_base 1: mod_base = OTHER; note = "2'-O-Methyl nucleoside"
  modified_base 3: mod_base = OTHER; note = "2'-O-Methyl nucleoside"
  modified_base 5: mod_base = OTHER; note = "2'-O-Methyl nucleoside"
  modified_base 7: mod_base = OTHER; note = "2'-O-Methyl nucleoside"
  modified_base 9: mod_base = OTHER; note = "2'-O-Methyl nucleoside"
  modified_base 11: mod_base = OTHER; note = "2'-O-Methyl nucleoside"
  modified_base 13: mod_base = OTHER; note = "2'-O-Methyl nucleoside"
  modified_base 15: mod_base = OTHER; note = "2'-O-Methyl nucleoside"
  modified_base 17: mod_base = OTHER; note = "2'-O-Methyl nucleoside"
  modified_base 19: mod_base = OTHER; note = "2'-O-Methyl nucleoside"
  modified_base 21: mod_base = OTHER; note = "2'-O-Methyl nucleoside"
  modified_base 2..4: mod_base = OTHER; note = "phosphorothioate linked nucleoside"
  modified_base 21: mod_base = OTHER; note = "phosphorothioate linked nucleoside"
  source 1..21: mol_type = other RNA
tgaagcgaagtgcacacggac

SEQ ID NO: 376 - RNA, 23 nt, synthetic construct
  misc_feature 1..23: note = HBV RNAi trigger antisense strand
  modified_base 2: mod_base = OTHER; note = "2'-deoxy-3'-fluoro nucleoside"
  modified_base 4: mod_base = OTHER; note = "2'-deoxy-3'-fluoro nucleoside"
  modified_base 6: mod_base = OTHER; note = "2'-deoxy-3'-fluoro nucleoside"
  modified_base 8: mod_base = OTHER; note = "2'-deoxy-3'-fluoro nucleoside"
  modified_base 10: mod_base = OTHER; note = "2'-deoxy-3'-fluoro nucleoside"
  modified_base 12: mod_base = OTHER; note = "2'-deoxy-3'-fluoro nucleoside"
  modified_base 14: mod_base = OTHER; note = "2'-deoxy-3'-fluoro nucleoside"
  modified_base 16: mod_base = OTHER; note = "2'-deoxy-3'-fluoro nucleoside"
  modified_base 18: mod_base = OTHER; note = "2'-deoxy-3'-fluoro nucleoside"
  modified_base 20: mod_base = OTHER; note = "2'-deoxy-3'-fluoro nucleoside"
  modified_base 1: mod_base = OTHER; note = "2'-O-Methyl nucleoside"
  modified_base 3: mod_base = OTHER; note = "2'-O-Methyl nucleoside"
  modified_base 5: mod_base = OTHER; note = "2'-O-Methyl nucleoside"
  modified_base 7: mod_base = OTHER; note = "2'-O-Methyl nucleoside"
  modified_base 9: mod_base = OTHER; note = "2'-O-Methyl nucleoside"
  modified_base 11: mod_base = OTHER; note = "2'-O-Methyl nucleoside"
  modified_base 13: mod_base = OTHER; note = "2'-O-Methyl nucleoside"
  modified_base 15: mod_base = OTHER; note = "2'-O-Methyl nucleoside"
  modified_base 17: mod_base = OTHER; note = "2'-O-Methyl nucleoside"
  modified_base 19: mod_base = OTHER; note = "2'-O-Methyl nucleoside"
  modified_base 21..23: mod_base = OTHER; note = "2'-O-Methyl nucleoside"
  modified_base 2..3: mod_base = OTHER; note = "phosphorothioate linked nucleoside"
  modified_base 22..23: mod_base = OTHER; note = "phosphorothioate linked nucleoside"
  source 1..23: mol_type = other RNA
tggacaaacgggcaacatacctt

SEQ ID NO: 377 - RNA, 23 nt, synthetic construct
  misc_feature 1..23: note = HBV RNAi trigger antisense strand
  modified_base 2: mod_base = OTHER; note = "2'-deoxy-3'-fluoro nucleoside"
  modified_base 4: mod_base = OTHER; note = "2'-deoxy-3'-fluoro nucleoside"
  modified_base 6: mod_base = OTHER; note = "2'-deoxy-3'-fluoro nucleoside"
  modified_base 8: mod_base = OTHER; note = "2'-deoxy-3'-fluoro nucleoside"
  modified_base 10: mod_base = OTHER; note = "2'-deoxy-3'-fluoro nucleoside"
  modified_base 12: mod_base = OTHER; note = "2'-deoxy-3'-fluoro nucleoside"
  modified_base 14: mod_base = OTHER; note = "2'-deoxy-3'-fluoro nucleoside"
  modified_base 16: mod_base = OTHER; note = "2'-deoxy-3'-fluoro nucleoside"
  modified_base 18: mod_base = OTHER; note = "2'-deoxy-3'-fluoro nucleoside"
  modified_base 20: mod_base = OTHER; note = "2'-deoxy-3'-fluoro nucleoside"
  modified_base 1: mod_base = OTHER; note = "2'-O-Methyl nucleoside"
  modified_base 3: mod_base = OTHER; note = "2'-O-Methyl nucleoside"
  modified_base 5: mod_base = OTHER; note = "2'-O-Methyl nucleoside"
  modified_base 7: mod_base = OTHER; note = "2'-O-Methyl nucleoside"
  modified_base 9: mod_base = OTHER; note = "2'-O-Methyl nucleoside"
  modified_base 11: mod_base = OTHER; note = "2'-O-Methyl nucleoside"
  modified_base 13: mod_base = OTHER; note = "2'-O-Methyl nucleoside"
  modified_base 15: mod_base = OTHER; note = "2'-O-Methyl nucleoside"
  modified_base 17: mod_base = OTHER; note = "2'-O-Methyl nucleoside"
  modified_base 19: mod_base = OTHER; note = "2'-O-Methyl nucleoside"
  modified_base 21..23: mod_base = OTHER; note = "2'-O-Methyl nucleoside"
  modified_base 2..4: mod_base = OTHER; note = "phosphorothioate linked nucleoside"
  modified_base 23: mod_base = OTHER; note = "phosphorothioate linked nucleoside"
  source 1..23: mol_type = other RNA
tggacaaacgggcaacatacctt

SEQ ID NO: 378 - RNA, 21 nt, synthetic construct
  misc_feature 1..21: note = HBV RNAi trigger antisense strand
  modified_base 2: mod_base = OTHER; note = "2'-deoxy-3'-fluoro nucleoside"
  modified_base 4: mod_base = OTHER; note = "2'-deoxy-3'-fluoro nucleoside"
  modified_base 6: mod_base = OTHER; note = "2'-deoxy-3'-fluoro nucleoside"
  modified_base 8: mod_base = OTHER; note = "2'-deoxy-3'-fluoro nucleoside"
  modified_base 10: mod_base = OTHER; note = "2'-deoxy-3'-fluoro nucleoside"
  modified_base 12: mod_base = OTHER; note = "2'-deoxy-3'-fluoro nucleoside"
  modified_base 14: mod_base = OTHER; note = "2'-deoxy-3'-fluoro nucleoside"
  modified_base 16: mod_base = OTHER; note = "2'-deoxy-3'-fluoro nucleoside"
  modified_base 18: mod_base = OTHER; note = "2'-deoxy-3'-fluoro nucleoside"
  modified_base 20: mod_base = OTHER; note = "2'-deoxy-3'-fluoro nucleoside"
  modified_base 1: mod_base = OTHER; note = "2'-O-Methyl nucleoside"
  modified_base 3: mod_base = OTHER; note = "2'-O-Methyl nucleoside"
  modified_base 5: mod_base = OTHER; note = "2'-O-Methyl nucleoside"
  modified_base 7: mod_base = OTHER; note = "2'-O-Methyl nucleoside"
  modified_base 9: mod_base = OTHER; note = "2'-O-Methyl nucleoside"
  modified_base 11: mod_base = OTHER; note = "2'-O-Methyl nucleoside"
  modified_base 13: mod_base = OTHER; note = "2'-O-Methyl nucleoside"
  modified_base 15: mod_base = OTHER; note = "2'-O-Methyl nucleoside"
  modified_base 17: mod_base = OTHER; note = "2'-O-Methyl nucleoside"
  modified_base 19: mod_base = OTHER; note = "2'-O-Methyl nucleoside"
  modified_base 21: mod_base = OTHER; note = "2'-O-Methyl nucleoside"
  modified_base 2..4: mod_base = OTHER; note = "phosphorothioate linked nucleoside"
  modified_base 21: mod_base = OTHER; note = "phosphorothioate linked nucleoside"
  source 1..21: mol_type = other RNA
tggacaaacgggcaacatacc

SEQ ID NO: 379 - RNA, 17 nt, synthetic construct
  modified_base 16..17: mod_base = OTHER; note = thymine
  misc_feature 1..17: note = HBV RNAi trigger antisense strand
  modified_base 17: mod_base = OTHER; note = "phosphorothioate linked nucleoside"
  modified_base 16..17: mod_base = OTHER; note = thymine
  source 1..17: mol_type = other RNA
ataaaacgccgcagatt

SEQ ID NO: 380 - RNA, 21 nt, synthetic construct
  misc_feature 1..21: note = HBV RNAi trigger antisense strand
  modified_base 2: mod_base = OTHER; note = "2'-deoxy-3'-fluoro nucleoside"
  modified_base 6: mod_base = OTHER; note = "2'-deoxy-3'-fluoro nucleoside"
  modified_base 8..9: mod_base = OTHER; note = "2'-deoxy-3'-fluoro nucleoside"
  modified_base 14: mod_base = OTHER; note = "2'-deoxy-3'-fluoro nucleoside"
  modified_base 16: mod_base = OTHER; note = "2'-deoxy-3'-fluoro nucleoside"
  modified_base 1: mod_base = OTHER; note = "2'-O-Methyl nucleoside"
  modified_base 3..5: mod_base = OTHER; note = "2'-O-Methyl nucleoside"
  modified_base 7: mod_base = OTHER; note = "2'-O-Methyl nucleoside"
  modified_base 10..13: mod_base = OTHER; note = "2'-O-Methyl nucleoside"
  modified_base 15: mod_base = OTHER; note = "2'-O-Methyl nucleoside"
  modified_base 17..21: mod_base = OTHER; note = "2'-O-Methyl nucleoside"
  modified_base 2..3: mod_base = OTHER; note = "phosphorothioate linked nucleoside"
  modified_base 20..21: mod_base = OTHER; note = "phosphorothioate linked nucleoside"
  source 1..21: mol_type = other RNA
tgtgaagcgaagtgcacactt

SEQ ID NO: 381 - RNA, 23 nt, synthetic construct
  misc_feature 1..23: note = HBV RNAi trigger antisense strand
  modified_base 2: mod_base = OTHER; note = "2'-deoxy-3'-fluoro nucleoside"
  modified_base 6: mod_base = OTHER; note = "2'-deoxy-3'-fluoro nucleoside"
  modified_base 8..9: mod_base = OTHER; note = "2'-deoxy-3'-fluoro nucleoside"
  modified_base 14: mod_base = OTHER; note = "2'-deoxy-3'-fluoro nucleoside"
  modified_base 16: mod_base = OTHER; note = "2'-deoxy-3'-fluoro nucleoside"
  modified_base 1: mod_base = OTHER; note = "2'-O-Methyl nucleoside"
  modified_base 3..5: mod_base = OTHER; note = "2'-O-Methyl nucleoside"
  modified_base 7: mod_base = OTHER; note = "2'-O-Methyl nucleoside"
  modified_base 10..13: mod_base = OTHER; note = "2'-O-Methyl nucleoside"
  modified_base 15: mod_base = OTHER; note = "2'-O-Methyl nucleoside"
  modified_base 17..23: mod_base = OTHER; note = "2'-O-Methyl nucleoside"
  modified_base 2..3: mod_base = OTHER; note = "phosphorothioate linked nucleoside"
  modified_base 22..23: mod_base = OTHER; note = "phosphorothioate linked nucleoside"
  source 1..23: mol_type = other RNA
taaaattgagagaagtccaccac

SEQ ID NO: 382 - RNA, 26 nt, synthetic construct
  misc_feature 1..26: note = HBV RNAi trigger antisense strand
  modified_base 2: mod_base = OTHER; note = "2'-deoxy-3'-fluoro nucleoside"
  modified_base 4: mod_base = OTHER; note = "2'-deoxy-3'-fluoro nucleoside"
  modified_base 6: mod_base = OTHER; note = "2'-deoxy-3'-fluoro nucleoside"
  modified_base 8: mod_base = OTHER; note = "2'-deoxy-3'-fluoro nucleoside"
  modified_base 10: mod_base = OTHER; note = "2'-deoxy-3'-fluoro nucleoside"
  modified_base 12: mod_base = OTHER; note = "2'-deoxy-3'-fluoro nucleoside"
  modified_base 14: mod_base = OTHER; note = "2'-deoxy-3'-fluoro nucleoside"
  modified_base 16: mod_base = OTHER; note = "2'-deoxy-3'-fluoro nucleoside"
  modified_base 18: mod_base = OTHER; note = "2'-deoxy-3'-fluoro nucleoside"
  modified_base 20: mod_base = OTHER; note = "2'-deoxy-3'-fluoro nucleoside"
  modified_base 1: mod_base = OTHER; note = "2'-O-Methyl nucleoside"
  modified_base 3: mod_base = OTHER; note = "2'-O-Methyl nucleoside"
  modified_base 5: mod_base = OTHER; note = "2'-O-Methyl nucleoside"
  modified_base 7: mod_base = OTHER; note = "2'-O-Methyl nucleoside"
  modified_base 9: mod_base = OTHER; note = "2'-O-Methyl nucleoside"
  modified_base 11: mod_base = OTHER; note = "2'-O-Methyl nucleoside"
  modified_base 13: mod_base = OTHER; note = "2'-O-Methyl nucleoside"
  modified_base 15: mod_base = OTHER; note = "2'-O-Methyl nucleoside"
  modified_base 17: mod_base = OTHER; note = "2'-O-Methyl nucleoside"
  modified_base 19: mod_base = OTHER; note = "2'-O-Methyl nucleoside"
  modified_base 21..26: mod_base = OTHER; note = "2'-O-Methyl nucleoside"
  modified_base 2..3: mod_base = OTHER; note = "phosphorothioate linked nucleoside"
  modified_base 22..23: mod_base = OTHER; note = "phosphorothioate linked nucleoside"
  source 1..26: mol_type = other RNA
ttgaagcgaagtgcacacggaccgcg

SEQ ID NO: 383 - RNA, 26 nt, synthetic construct
  misc_feature 1..26: note = HBV RNAi trigger antisense strand
  modified_base 2: mod_base = OTHER; note = "2'-deoxy-3'-fluoro nucleoside"
  modified_base 4: mod_base = OTHER; note = "2'-deoxy-3'-fluoro nucleoside"
  modified_base 6: mod_base = OTHER; note = "2'-deoxy-3'-fluoro nucleoside"
  modified_base 8: mod_base = OTHER; note = "2'-deoxy-3'-fluoro nucleoside"
  modified_base 10: mod_base = OTHER; note = "2'-deoxy-3'-fluoro nucleoside"
  modified_base 12: mod_base = OTHER; note = "2'-deoxy-3'-fluoro nucleoside"
  modified_base 14: mod_base = OTHER; note = "2'-deoxy-3'-fluoro nucleoside"
  modified_base 16: mod_base = OTHER; note = "2'-deoxy-3'-fluoro nucleoside"
  modified_base 18: mod_base = OTHER; note = "2'-deoxy-3'-fluoro nucleoside"
  modified_base 20: mod_base = OTHER; note = "2'-deoxy-3'-fluoro nucleoside"
  modified_base 1: mod_base = OTHER; note = "2'-O-Methyl nucleoside"
  modified_base 3: mod_base = OTHER; note = "2'-O-Methyl nucleoside"
  modified_base 5: mod_base = OTHER; note = "2'-O-Methyl nucleoside"
  modified_base 7: mod_base = OTHER; note = "2'-O-Methyl nucleoside"
  modified_base 9: mod_base = OTHER; note = "2'-O-Methyl nucleoside"
  modified_base 11: mod_base = OTHER; note = "2'-O-Methyl nucleoside"
  modified_base 13: mod_base = OTHER; note = "2'-O-Methyl nucleoside"
  modified_base 15: mod_base = OTHER; note = "2'-O-Methyl nucleoside"
  modified_base 17: mod_base = OTHER; note = "2'-O-Methyl nucleoside"
  modified_base 19: mod_base = OTHER; note = "2'-O-Methyl nucleoside"
  modified_base 21..26: mod_base = OTHER; note = "2'-O-Methyl nucleoside"
  modified_base 2..3: mod_base = OTHER; note = "phosphorothioate linked nucleoside"
  modified_base 22..23: mod_base = OTHER; note = "phosphorothioate linked nucleoside"
  modified_base 1: mod_base = OTHER; note = "vinyl phophonate modified nucleoside"
  source 1..26: mol_type = other RNA
ttgaagcgaagtgcacacggaccgcg

SEQ ID NO: 384 - RNA, 26 nt, synthetic construct
  misc_feature 1..26: note = HBV RNAi trigger antisense strand
  modified_base 2: mod_base = OTHER; note = "2'-deoxy-3'-fluoro nucleoside"
  modified_base 4: mod_base = OTHER; note = "2'-deoxy-3'-fluoro nucleoside"
  modified_base 6: mod_base = OTHER; note = "2'-deoxy-3'-fluoro nucleoside"
  modified_base 8: mod_base = OTHER; note = "2'-deoxy-3'-fluoro nucleoside"
  modified_base 10: mod_base = OTHER; note = "2'-deoxy-3'-fluoro nucleoside"
  modified_base 12: mod_base = OTHER; note = "2'-deoxy-3'-fluoro nucleoside"
  modified_base 14: mod_base = OTHER; note = "2'-deoxy-3'-fluoro nucleoside"
  modified_base 16: mod_base = OTHER; note = "2'-deoxy-3'-fluoro nucleoside"
  modified_base 18: mod_base = OTHER; note = "2'-deoxy-3'-fluoro nucleoside"
  modified_base 20: mod_base = OTHER; note = "2'-deoxy-3'-fluoro nucleoside"
  modified_base 1: mod_base = OTHER; note = "2'-O-Methyl nucleoside"
  modified_base 3: mod_base = OTHER; note = "2'-O-Methyl nucleoside"
  modified_base 5: mod_base = OTHER; note = "2'-O-Methyl nucleoside"
  modified_base 7: mod_base = OTHER; note = "2'-O-Methyl nucleoside"
  modified_base 9: mod_base = OTHER; note = "2'-O-Methyl nucleoside"
  modified_base 11: mod_base = OTHER; note = "2'-O-Methyl nucleoside"
  modified_base 13: mod_base = OTHER; note = "2'-O-Methyl nucleoside"
  modified_base 15: mod_base = OTHER; note = "2'-O-Methyl nucleoside"
  modified_base 17: mod_base = OTHER; note = "2'-O-Methyl nucleoside"
  modified_base 19: mod_base = OTHER; note = "2'-O-Methyl nucleoside"
  modified_base 21..26: mod_base = OTHER; note = "2'-O-Methyl nucleoside"
  modified_base 2..3: mod_base = OTHER; note = "phosphorothioate linked nucleoside"
  modified_base 22..23: mod_base = OTHER; note = "phosphorothioate linked nucleoside"
  source 1..26: mol_type = other RNA
tgtgaagcgaagtgcacacggaccgc

SEQ ID NO: 385 - RNA, 26 nt, synthetic construct
  misc_feature 1..26: note = HBV RNAi trigger antisense strand
  modified_base 2: mod_base = OTHER; note = "2'-deoxy-3'-fluoro nucleoside"
  modified_base 4: mod_base = OTHER; note = "2'-deoxy-3'-fluoro nucleoside"
  modified_base 6: mod_base = OTHER; note = "2'-deoxy-3'-fluoro nucleoside"
  modified_base 8: mod_base = OTHER; note = "2'-deoxy-3'-fluoro nucleoside"
  modified_base 10: mod_base = OTHER; note = "2'-deoxy-3'-fluoro nucleoside"
  modified_base 12: mod_base = OTHER; note = "2'-deoxy-3'-fluoro nucleoside"
  modified_base 14: mod_base = OTHER; note = "2'-deoxy-3'-fluoro nucleoside"
  modified_base 16: mod_base = OTHER; note = "2'-deoxy-3'-fluoro nucleoside"
  modified_base 18: mod_base = OTHER; note = "2'-deoxy-3'-fluoro nucleoside"
  modified_base 20: mod_base = OTHER; note = "2'-deoxy-3'-fluoro nucleoside"
  modified_base 1: mod_base = OTHER; note = "2'-O-Methyl nucleoside"
  modified_base 3: mod_base = OTHER; note = "2'-O-Methyl nucleoside"
  modified_base 5: mod_base = OTHER; note = "2'-O-Methyl nucleoside"
  modified_base 7: mod_base = OTHER; note = "2'-O-Methyl nucleoside"
  modified_base 9: mod_base = OTHER; note = "2'-O-Methyl nucleoside"
  modified_base 11: mod_base = OTHER; note = "2'-O-Methyl nucleoside"
  modified_base 13: mod_base = OTHER; note = "2'-O-Methyl nucleoside"
  modified_base 15: mod_base = OTHER; note = "2'-O-Methyl nucleoside"
  modified_base 17: mod_base = OTHER; note = "2'-O-Methyl nucleoside"
  modified_base 19: mod_base = OTHER; note = "2'-O-Methyl nucleoside"
  modified_base 21..26: mod_base = OTHER; note = "2'-O-Methyl nucleoside"
  modified_base 2..3: mod_base = OTHER; note = "phosphorothioate linked nucleoside"
  modified_base 22..23: mod_base = OTHER; note = "phosphorothioate linked nucleoside"
  modified_base 1: mod_base = OTHER; note = "vinyl phophonate modified nucleoside"
  source 1..26: mol_type = other RNA
tgtgaagcgaagtgcacacggaccgc

SEQ ID NO: 386 - RNA, 26 nt, synthetic construct
  misc_feature 1..26: note = HBV RNAi trigger antisense strand
  modified_base 2: mod_base = OTHER; note = "2'-deoxy-3'-fluoro nucleoside"
  modified_base 4: mod_base = OTHER; note = "2'-deoxy-3'-fluoro nucleoside"
  modified_base 6: mod_base = OTHER; note = "2'-deoxy-3'-fluoro nucleoside"
  modified_base 8: mod_base = OTHER; note = "2'-deoxy-3'-fluoro nucleoside"
  modified_base 10: mod_base = OTHER; note = "2'-deoxy-3'-fluoro nucleoside"
  modified_base 12: mod_base = OTHER; note = "2'-deoxy-3'-fluoro nucleoside"
  modified_base 14: mod_base = OTHER; note = "2'-deoxy-3'-fluoro nucleoside"
  modified_base 16: mod_base = OTHER; note = "2'-deoxy-3'-fluoro nucleoside"
  modified_base 18: mod_base = OTHER; note = "2'-deoxy-3'-fluoro nucleoside"
  modified_base 20: mod_base = OTHER; note = "2'-deoxy-3'-fluoro nucleoside"
  modified_base 1: mod_base = OTHER; note = "2'-O-Methyl nucleoside"
  modified_base 3: mod_base = OTHER; note = "2'-O-Methyl nucleoside"
  modified_base 5: mod_base = OTHER; note = "2'-O-Methyl nucleoside"
  modified_base 7: mod_base = OTHER; note = "2'-O-Methyl nucleoside"
  modified_base 9: mod_base = OTHER; note = "2'-O-Methyl nucleoside"
  modified_base 11: mod_base = OTHER; note = "2'-O-Methyl nucleoside"
  modified_base 13: mod_base = OTHER; note = "2'-O-Methyl nucleoside"
  modified_base 15: mod_base = OTHER; note = "2'-O-Methyl nucleoside"
  modified_base 17: mod_base = OTHER; note = "2'-O-Methyl nucleoside"
  modified_base 19: mod_base = OTHER; note = "2'-O-Methyl nucleoside"
  modified_base 21..26: mod_base = OTHER; note = "2'-O-Methyl nucleoside"
  modified_base 2..3: mod_base = OTHER; note = "phosphorothioate linked nucleoside"
  modified_base 22..23: mod_base = OTHER; note = "phosphorothioate linked nucleoside"
  source 1..26: mol_type = other RNA
tgataaaacgccgcagacacatccgc

SEQ ID NO: 387 - RNA, 26 nt, synthetic construct
  misc_feature 1..26: note = HBV RNAi trigger antisense strand
  modified_base 2: mod_base = OTHER; note = "2'-deoxy-3'-fluoro nucleoside"
  modified_base 4: mod_base = OTHER; note = "2'-deoxy-3'-fluoro nucleoside"
  modified_base 6: mod_base = OTHER; note = "2'-deoxy-3'-fluoro nucleoside"
  modified_base 8: mod_base = OTHER; note = "2'-deoxy-3'-fluoro nucleoside"
  modified_base 10: mod_base = OTHER; note = "2'-deoxy-3'-fluoro nucleoside"
  modified_base 12: mod_base = OTHER; note = "2'-deoxy-3'-fluoro nucleoside"
  modified_base 14: mod_base = OTHER; note = "2'-deoxy-3'-fluoro nucleoside"
  modified_base 16: mod_base = OTHER; note = "2'-deoxy-3'-fluoro nucleoside"
  modified_base 18: mod_base = OTHER; note = "2'-deoxy-3'-fluoro nucleoside"
  modified_base 20: mod_base = OTHER; note = "2'-deoxy-3'-fluoro nucleoside"
  modified_base 1: mod_base = OTHER; note = "2'-O-Methyl nucleoside"
  modified_base 3: mod_base = OTHER; note = "2'-O-Methyl nucleoside"
  modified_base 5: mod_base = OTHER; note = "2'-O-Methyl nucleoside"
  modified_base 7: mod_base = OTHER; note = "2'-O-Methyl nucleoside"
  modified_base 9: mod_base = OTHER; note = "2'-O-Methyl nucleoside"
  modified_base 11: mod_base = OTHER; note = "2'-O-Methyl nucleoside"
  modified_base 13: mod_base = OTHER; note = "2'-O-Methyl nucleoside"
  modified_base 15: mod_base = OTHER; note = "2'-O-Methyl nucleoside"
  modified_base 17: mod_base = OTHER; note = "2'-O-Methyl nucleoside"
  modified_base 19: mod_base = OTHER; note = "2'-O-Methyl nucleoside"
  modified_base 21..26: mod_base = OTHER; note = "2'-O-Methyl nucleoside"
  modified_base 2..3: mod_base = OTHER; note = "phosphorothioate linked nucleoside"
  modified_base 22..23: mod_base = OTHER; note = "phosphorothioate linked nucleoside"
  modified_base 1: mod_base = OTHER; note = "vinyl phophonate modified nucleoside"
  source 1..26: mol_type = other RNA
tgataaaacgccgcagacacatccgc

SEQ ID NO: 388 - RNA, 26 nt, synthetic construct
  misc_feature 1..26: note = HBV RNAi trigger antisense strand
  modified_base 2: mod_base = OTHER; note = "2'-deoxy-3'-fluoro nucleoside"
  modified_base 4: mod_base = OTHER; note = "2'-deoxy-3'-fluoro nucleoside"
  modified_base 6: mod_base = OTHER; note = "2'-deoxy-3'-fluoro nucleoside"
  modified_base 8: mod_base = OTHER; note = "2'-deoxy-3'-fluoro nucleoside"
  modified_base 10: mod_base = OTHER; note = "2'-deoxy-3'-fluoro nucleoside"
  modified_base 12: mod_base = OTHER; note = "2'-deoxy-3'-fluoro nucleoside"
  modified_base 14: mod_base = OTHER; note = "2'-deoxy-3'-fluoro nucleoside"
  modified_base 16: mod_base = OTHER; note = "2'-deoxy-3'-fluoro nucleoside"
  modified_base 18: mod_base = OTHER; note = "2'-deoxy-3'-fluoro nucleoside"
  modified_base 20: mod_base = OTHER; note = "2'-deoxy-3'-fluoro nucleoside"
  modified_base 1: mod_base = OTHER; note = "2'-O-Methyl nucleoside"
  modified_base 3: mod_base = OTHER; note = "2'-O-Methyl nucleoside"
  modified_base 5: mod_base = OTHER; note = "2'-O-Methyl nucleoside"
  modified_base 7: mod_base = OTHER; note = "2'-O-Methyl nucleoside"
  modified_base 9: mod_base = OTHER; note = "2'-O-Methyl nucleoside"
  modified_base 11: mod_base = OTHER; note = "2'-O-Methyl nucleoside"
  modified_base 13: mod_base = OTHER; note = "2'-O-Methyl nucleoside"
  modified_base 15: mod_base = OTHER; note = "2'-O-Methyl nucleoside"
  modified_base 17: mod_base = OTHER; note = "2'-O-Methyl nucleoside"
  modified_base 19: mod_base = OTHER; note = "2'-O-Methyl nucleoside"
  modified_base 21..26: mod_base = OTHER; note = "2'-O-Methyl nucleoside"
  modified_base 2..3: mod_base = OTHER; note = "phosphorothioate linked nucleoside"
  modified_base 22..23: mod_base = OTHER; note = "phosphorothioate linked nucleoside"
  source 1..26: mol_type = other RNA
tatgataaaacgccgcagacacacgc

SEQ ID NO: 389 - RNA, 26 nt, synthetic construct
  misc_feature 1..26: note = HBV RNAi trigger antisense strand
  modified_base 2: mod_base = OTHER; note = "2'-deoxy-3'-fluoro nucleoside"
  modified_base 4: mod_base = OTHER; note = "2'-deoxy-3'-fluoro nucleoside"
  modified_base 6: mod_base = OTHER; note = "2'-deoxy-3'-fluoro nucleoside"
  modified_base 8: mod_base = OTHER; note = "2'-deoxy-3'-fluoro nucleoside"
  modified_base 10: mod_base = OTHER; note = "2'-deoxy-3'-fluoro nucleoside"
  modified_base 12: mod_base = OTHER; note = "2'-deoxy-3'-fluoro nucleoside"
  modified_base 14: mod_base = OTHER; note = "2'-deoxy-3'-fluoro nucleoside"
  modified_base 16: mod_base = OTHER; note = "2'-deoxy-3'-fluoro nucleoside"
  modified_base 18: mod_base = OTHER; note = "2'-deoxy-3'-fluoro nucleoside"
  modified_base 20: mod_base = OTHER; note = "2'-deoxy-3'-fluoro nucleoside"
  modified_base 1: mod_base = OTHER; note = "2'-O-Methyl nucleoside"
  modified_base 3: mod_base = OTHER; note = "2'-O-Methyl nucleoside"
  modified_base 5: mod_base = OTHER; note = "2'-O-Methyl nucleoside"
  modified_base 7: mod_base = OTHER; note = "2'-O-Methyl nucleoside"
  modified_base 9: mod_base = OTHER; note = "2'-O-Methyl nucleoside"
  modified_base 11: mod_base = OTHER; note = "2'-O-Methyl nucleoside"
  modified_base 13: mod_base = OTHER; note = "2'-O-Methyl nucleoside"
  modified_base 15: mod_base = OTHER; note = "2'-O-Methyl nucleoside"
  modified_base 17: mod_base = OTHER; note = "2'-O-Methyl nucleoside"
  modified_base 19: mod_base = OTHER; note = "2'-O-Methyl nucleoside"
  modified_base 21..26: mod_base = OTHER; note = "2'-O-Methyl nucleoside"
  modified_base 2..3: mod_base = OTHER; note = "phosphorothioate linked nucleoside"
  modified_base 22..23: mod_base = OTHER; note = "phosphorothioate linked nucleoside"
  modified_base 1: mod_base = OTHER; note = "vinyl phophonate modified nucleoside"
  source 1..26: mol_type = other RNA
tatgataaaacgccgcagacacacgc

SEQ ID NO: 390 - RNA, 26 nt, synthetic construct
  misc_feature 1..26: note = HBV RNAi trigger antisense strand
  modified_base 2: mod_base = OTHER; note = "2'-deoxy-3'-fluoro nucleoside"
  modified_base 4: mod_base = OTHER; note = "2'-deoxy-3'-fluoro nucleoside"
  modified_base 6: mod_base = OTHER; note = "2'-deoxy-3'-fluoro nucleoside"
  modified_base 8: mod_base = OTHER; note = "2'-deoxy-3'-fluoro nucleoside"
  modified_base 10: mod_base = OTHER; note = "2'-deoxy-3'-fluoro nucleoside"
  modified_base 12: mod_base = OTHER; note = "2'-deoxy-3'-fluoro nucleoside"
  modified_base 14: mod_base = OTHER; note = "2'-deoxy-3'-fluoro nucleoside"
  modified_base 16: mod_base = OTHER; note = "2'-deoxy-3'-fluoro nucleoside"
  modified_base 18: mod_base = OTHER; note = "2'-deoxy-3'-fluoro nucleoside"
  modified_base 20: mod_base = OTHER; note = "2'-deoxy-3'-fluoro nucleoside"
  modified_base 1: mod_base = OTHER; note = "2'-O-Methyl nucleoside"
  modified_base 3: mod_base = OTHER; note = "2'-O-Methyl nucleoside"
  modified_base 5: mod_base = OTHER; note = "2'-O-Methyl nucleoside"
  modified_base 7: mod_base = OTHER; note = "2'-O-Methyl nucleoside"
  modified_base 9: mod_base = OTHER; note = "2'-O-Methyl nucleoside"
  modified_base 11: mod_base = OTHER; note = "2'-O-Methyl nucleoside"
  modified_base 13: mod_base = OTHER; note = "2'-O-Methyl nucleoside"
  modified_base 15: mod_base = OTHER; note = "2'-O-Methyl nucleoside"
  modified_base 17: mod_base = OTHER; note = "2'-O-Methyl nucleoside"
  modified_base 19: mod_base = OTHER; note = "2'-O-Methyl nucleoside"
  modified_base 21..26: mod_base = OTHER; note = "2'-O-Methyl nucleoside"
  modified_base 2..3: mod_base = OTHER; note = "phosphorothioate linked nucleoside"
  modified_base 22..23: mod_base = OTHER; note = "phosphorothioate linked nucleoside"
  source 1..26: mol_type = other RNA
agtgaagcgaagtgcacacggaccgc

SEQ ID NO: 391 - RNA, 26 nt, synthetic construct
  misc_feature 1..26: note = HBV RNAi trigger antisense strand
  modified_base 2: mod_base = OTHER; note = "2'-deoxy-3'-fluoro nucleoside"
  modified_base 4: mod_base = OTHER; note = "2'-deoxy-3'-fluoro nucleoside"
  modified_base 6: mod_base = OTHER; note = "2'-deoxy-3'-fluoro nucleoside"
  modified_base 8: mod_base = OTHER; note = "2'-deoxy-3'-fluoro nucleoside"
  modified_base 10: mod_base = OTHER; note = "2'-deoxy-3'-fluoro nucleoside"
  modified_base 12: mod_base = OTHER; note = "2'-deoxy-3'-fluoro nucleoside"
  modified_base 14: mod_base = OTHER; note = "2'-deoxy-3'-fluoro nucleoside"
  modified_base 16: mod_base = OTHER; note = "2'-deoxy-3'-fluoro nucleoside"
  modified_base 18: mod_base = OTHER; note = "2'-deoxy-3'-fluoro nucleoside"
  modified_base 20: mod_base = OTHER; note = "2'-deoxy-3'-fluoro nucleoside"
  modified_base 1: mod_base = OTHER; note = "2'-O-Methyl nucleoside"
  modified_base 3: mod_base = OTHER; note = "2'-O-Methyl nucleoside"
  modified_base 5: mod_base = OTHER; note = "2'-O-Methyl nucleoside"
  modified_base 7: mod_base = OTHER; note = "2'-O-Methyl nucleoside"
  modified_base 9: mod_base = OTHER; note = "2'-O-Methyl nucleoside"
  modified_base 11: mod_base = OTHER; note = "2'-O-Methyl nucleoside"
  modified_base 13: mod_base = OTHER; note = "2'-O-Methyl nucleoside"
  modified_base 15: mod_base = OTHER; note = "2'-O-Methyl nucleoside"
  modified_base 17: mod_base = OTHER; note = "2'-O-Methyl nucleoside"
  modified_base 19: mod_base = OTHER; note = "2'-O-Methyl nucleoside"
  modified_base 21..26: mod_base = OTHER; note = "2'-O-Methyl nucleoside"
  modified_base 2..3: mod_base = OTHER; note = "phosphorothioate linked nucleoside"
  modified_base 22..23: mod_base = OTHER; note = "phosphorothioate linked nucleoside"
  source 1..26: mol_type = other RNA
aatgataaaacgccgcagacacacgc

SEQ ID NO: 392 - RNA, 26 nt, synthetic construct
  misc_feature 1..26: note = HBV RNAi trigger antisense strand
  modified_base 2: mod_base = OTHER; note = "2'-deoxy-3'-fluoro nucleoside"
  modified_base 4: mod_base = OTHER; note = "2'-deoxy-3'-fluoro nucleoside"
  modified_base 6: mod_base = OTHER; note = "2'-deoxy-3'-fluoro nucleoside"
  modified_base 8: mod_base = OTHER; note = "2'-deoxy-3'-fluoro nucleoside"
  modified_base 10: mod_base = OTHER; note = "2'-deoxy-3'-fluoro nucleoside"
  modified_base 12: mod_base = OTHER; note = "2'-deoxy-3'-fluoro nucleoside"
  modified_base 14: mod_base = OTHER; note = "2'-deoxy-3'-fluoro nucleoside"
  modified_base 16: mod_base = OTHER; note = "2'-deoxy-3'-fluoro nucleoside"
  modified_base 18: mod_base = OTHER; note = "2'-deoxy-3'-fluoro nucleoside"
  modified_base 20: mod_base = OTHER; note = "2'-deoxy-3'-fluoro nucleoside"
  modified_base 1: mod_base = OTHER; note = "2'-O-Methyl nucleoside"
  modified_base 3: mod_base = OTHER; note = "2'-O-Methyl nucleoside"
  modified_base 5: mod_base = OTHER; note = "2'-O-Methyl nucleoside"
  modified_base 7: mod_base = OTHER; note = "2'-O-Methyl nucleoside"
  modified_base 9: mod_base = OTHER; note = "2'-O-Methyl nucleoside"
  modified_base 11: mod_base = OTHER; note = "2'-O-Methyl nucleoside"
  modified_base 13: mod_base = OTHER; note = "2'-O-Methyl nucleoside"
  modified_base 15: mod_base = OTHER; note = "2'-O-Methyl nucleoside"
  modified_base 17: mod_base = OTHER; note = "2'-O-Methyl nucleoside"
  modified_base 19: mod_base = OTHER; note = "2'-O-Methyl nucleoside"
  modified_base 21..26: mod_base = OTHER; note = "2'-O-Methyl nucleoside"
  modified_base 2..3: mod_base = OTHER; note = "phosphorothioate linked nucleoside"
  modified_base 22..23: mod_base = OTHER; note = "phosphorothioate linked nucleoside"
  source 1..26: mol_type = other RNA
tgaagcgaagtgcacacggaccgcgc

SEQ ID NO: 393 - RNA, 26 nt, synthetic construct
  misc_feature 1..26: note = HBV RNAi trigger antisense strand
  modified_base 2: mod_base = OTHER; note = "2'-deoxy-3'-fluoro nucleoside"
  modified_base 4: mod_base = OTHER; note = "2'-deoxy-3'-fluoro nucleoside"
  modified_base 6: mod_base = OTHER; note = "2'-deoxy-3'-fluoro nucleoside"
  modified_base 8: mod_base = OTHER; note = "2'-deoxy-3'-fluoro nucleoside"
  modified_base 10: mod_base = OTHER; note = "2'-deoxy-3'-fluoro nucleoside"
  modified_base 12: mod_base = OTHER; note = "2'-deoxy-3'-fluoro nucleoside"
  modified_base 14: mod_base = OTHER; note = "2'-deoxy-3'-fluoro nucleoside"
  modified_base 16: mod_base = OTHER; note = "2'-deoxy-3'-fluoro nucleoside"
  modified_base 18: mod_base = OTHER; note = "2'-deoxy-3'-fluoro nucleoside"
  modified_base 20: mod_base = OTHER; note = "2'-deoxy-3'-fluoro nucleoside"
  modified_base 1: mod_base = OTHER; note = "2'-O-Methyl nucleoside"
  modified_base 3: mod_base = OTHER; note = "2'-O-Methyl nucleoside"
  modified_base 5: mod_base = OTHER; note = "2'-O-Methyl nucleoside"
  modified_base 7: mod_base = OTHER; note = "2'-O-Methyl nucleoside"
  modified_base 9: mod_base = OTHER; note = "2'-O-Methyl nucleoside"
  modified_base 11: mod_base = OTHER; note = "2'-O-Methyl nucleoside"
  modified_base 13: mod_base = OTHER; note = "2'-O-Methyl nucleoside"
  modified_base 15: mod_base = OTHER; note = "2'-O-Methyl nucleoside"
  modified_base 17: mod_base = OTHER; note = "2'-O-Methyl nucleoside"
  modified_base 19: mod_base = OTHER; note = "2'-O-Methyl nucleoside"
  modified_base 21..26: mod_base = OTHER; note = "2'-O-Methyl nucleoside"
  modified_base 2..3: mod_base = OTHER; note = "phosphorothioate linked nucleoside"
  modified_base 22..23: mod_base = OTHER; note = "phosphorothioate linked nucleoside"
  modified_base 1: mod_base = OTHER; note = "vinyl phophonate modified nucleoside"
  source 1..26: mol_type = other RNA
tgaagcgaagtgcacacggaccgcgc

SEQ ID NO: 394 - RNA, 26 nt, synthetic construct
  misc_feature 1..26: note = HBV RNAi trigger antisense strand
  modified_base 2: mod_base = OTHER; note = "2'-deoxy-3'-fluoro nucleoside"
  modified_base 4: mod_base = OTHER; note = "2'-deoxy-3'-fluoro nucleoside"
  modified_base 6: mod_base = OTHER; note = "2'-deoxy-3'-fluoro nucleoside"
  modified_base 8: mod_base = OTHER; note = "2'-deoxy-3'-fluoro nucleoside"
  modified_base 10: mod_base = OTHER; note = "2'-deoxy-3'-fluoro nucleoside"
  modified_base 12: mod_base = OTHER; note = "2'-deoxy-3'-fluoro nucleoside"
  modified_base 14: mod_base = OTHER; note = "2'-deoxy-3'-fluoro nucleoside"
  modified_base 16: mod_base = OTHER; note = "2'-deoxy-3'-fluoro nucleoside"
  modified_base 18: mod_base = OTHER; note = "2'-deoxy-3'-fluoro nucleoside"
  modified_base 20: mod_base = OTHER; note = "2'-deoxy-3'-fluoro nucleoside"
  modified_base 1: mod_base = OTHER; note = "2'-O-Methyl nucleoside"
  modified_base 3: mod_base = OTHER; note = "2'-O-Methyl nucleoside"
  modified_base 5: mod_base = OTHER; note = "2'-O-Methyl nucleoside"
  modified_base 7: mod_base = OTHER; note = "2'-O-Methyl nucleoside"
  modified_base 9: mod_base = OTHER; note = "2'-O-Methyl nucleoside"
  modified_base 11: mod_base = OTHER; note = "2'-O-Methyl nucleoside"
  modified_base 13: mod_base = OTHER; note = "2'-O-Methyl nucleoside"
  modified_base 15: mod_base = OTHER; note = "2'-O-Methyl nucleoside"
  modified_base 17: mod_base = OTHER; note = "2'-O-Methyl nucleoside"
  modified_base 19: mod_base = OTHER; note = "2'-O-Methyl nucleoside"
  modified_base 21..26: mod_base = OTHER; note = "2'-O-Methyl nucleoside"
  modified_base 2..3: mod_base = OTHER; note = "phosphorothioate linked nucleoside"
  modified_base 22..23: mod_base = OTHER; note = "phosphorothioate linked nucleoside"
  source 1..26: mol_type = other RNA
tggacaaacgggcaacataccttcgc

SEQ ID NO: 395 - RNA, 26 nt, synthetic construct
  misc_feature 1..26: note = HBV RNAi trigger antisense strand
  modified_base 2: mod_base = OTHER; note = "2'-deoxy-3'-fluoro nucleoside"
  modified_base 4: mod_base = OTHER; note = "2'-deoxy-3'-fluoro nucleoside"
  modified_base 6: mod_base = OTHER; note = "2'-deoxy-3'-fluoro nucleoside"
  modified_base 8: mod_base = OTHER; note = "2'-deoxy-3'-fluoro nucleoside"
  modified_base 10: mod_base = OTHER; note = "2'-deoxy-3'-fluoro nucleoside"
  modified_base 12: mod_base = OTHER; note = "2'-deoxy-3'-fluoro nucleoside"
  modified_base 14: mod_base = OTHER; note = "2'-deoxy-3'-fluoro nucleoside"
  modified_base 16: mod_base = OTHER; note = "2'-deoxy-3'-fluoro nucleoside"
  modified_base 18: mod_base = OTHER; note = "2'-deoxy-3'-fluoro nucleoside"
  modified_base 20: mod_base = OTHER; note = "2'-deoxy-3'-fluoro nucleoside"
  modified_base 1: mod_base = OTHER; note = "2'-O-Methyl nucleoside"
  modified_base 3: mod_base = OTHER; note = "2'-O-Methyl nucleoside"
  modified_base 5: mod_base = OTHER; note = "2'-O-Methyl nucleoside"
  modified_base 7: mod_base = OTHER; note = "2'-O-Methyl nucleoside"
  modified_base 9: mod_base = OTHER; note = "2'-O-Methyl nucleoside"
  modified_base 11: mod_base = OTHER; note = "2'-O-Methyl nucleoside"
  modified_base 13: mod_base = OTHER; note = "2'-O-Methyl nucleoside"
  modified_base 15: mod_base = OTHER; note = "2'-O-Methyl nucleoside"
  modified_base 17: mod_base = OTHER; note = "2'-O-Methyl nucleoside"
  modified_base 19: mod_base = OTHER; note = "2'-O-Methyl nucleoside"
  modified_base 21..26: mod_base = OTHER; note = "2'-O-Methyl nucleoside"
  modified_base 2..3: mod_base = OTHER; note = "phosphorothioate linked nucleoside"
  modified_base 22..23: mod_base = OTHER; note = "phosphorothioate linked nucleoside"
  modified_base 1: mod_base = OTHER; note = "vinyl phophonate modified nucleoside"
  source 1..26: mol_type = other RNA
tggacaaacgggcaacataccttcgc

SEQ ID NO: 396 - RNA, 26 nt, synthetic construct
  misc_feature 1..26: note = HBV RNAi trigger antisense strand
  modified_base 2: mod_base = OTHER; note = "2'-deoxy-3'-fluoro nucleoside"
  modified_base 4: mod_base = OTHER; note = "2'-deoxy-3'-fluoro nucleoside"
  modified_base 6: mod_base = OTHER; note = "2'-deoxy-3'-fluoro nucleoside"
  modified_base 8: mod_base = OTHER; note = "2'-deoxy-3'-fluoro nucleoside"
  modified_base 10: mod_base = OTHER; note = "2'-deoxy-3'-fluoro nucleoside"
  modified_base 12: mod_base = OTHER; note = "2'-deoxy-3'-fluoro nucleoside"
  modified_base 14: mod_base = OTHER; note = "2'-deoxy-3'-fluoro nucleoside"
  modified_base 16: mod_base = OTHER; note = "2'-deoxy-3'-fluoro nucleoside"
  modified_base 18: mod_base = OTHER; note = "2'-deoxy-3'-fluoro nucleoside"
  modified_base 20: mod_base = OTHER; note = "2'-deoxy-3'-fluoro nucleoside"
  modified_base 1: mod_base = OTHER; note = "2'-O-Methyl nucleoside"
  modified_base 3: mod_base = OTHER; note = "2'-O-Methyl nucleoside"
  modified_base 5: mod_base = OTHER; note = "2'-O-Methyl nucleoside"
  modified_base 7: mod_base = OTHER; note = "2'-O-Methyl nucleoside"
  modified_base 9: mod_base = OTHER; note = "2'-O-Methyl nucleoside"
  modified_base 11: mod_base = OTHER; note = "2'-O-Methyl nucleoside"
  modified_base 13: mod_base = OTHER; note = "2'-O-Methyl nucleoside"
  modified_base 15: mod_base = OTHER; note = "2'-O-Methyl nucleoside"
  modified_base 17: mod_base = OTHER; note = "2'-O-Methyl nucleoside"
  modified_base 19: mod_base = OTHER; note = "2'-O-Methyl nucleoside"
  modified_base 21..26: mod_base = OTHER; note = "2'-O-Methyl nucleoside"
  modified_base 2..3: mod_base = OTHER; note = "phosphorothioate linked nucleoside"
  modified_base 22..23: mod_base = OTHER; note = "phosphorothioate linked nucleoside"
  source 1..26: mol_type = other RNA
taccaatttatgcctacagcctccgc

SEQ ID NO: 397 - RNA, 26 nt, synthetic construct
  misc_feature 1..26: note = HBV RNAi trigger antisense strand
  modified_base 2: mod_base = OTHER; note = "2'-deoxy-3'-fluoro nucleoside"
  modified_base 4: mod_base = OTHER; note = "2'-deoxy-3'-fluoro nucleoside"
  modified_base 6: mod_base = OTHER; note = "2'-deoxy-3'-fluoro nucleoside"
  modified_base 8: mod_base = OTHER; note = "2'-deoxy-3'-fluoro nucleoside"
  modified_base 10: mod_base = OTHER; note = "2'-deoxy-3'-fluoro nucleoside"
  modified_base 12: mod_base = OTHER; note = "2'-deoxy-3'-fluoro nucleoside"
  modified_base 14: mod_base = OTHER; note = "2'-deoxy-3'-fluoro nucleoside"
  modified_base 16: mod_base = OTHER; note = "2'-deoxy-3'-fluoro nucleoside"
  modified_base 18: mod_base = OTHER; note = "2'-deoxy-3'-fluoro nucleoside"
  modified_base 20: mod_base = OTHER; note = "2'-deoxy-3'-fluoro nucleoside"
  modified_base 1: mod_base = OTHER; note = "2'-O-Methyl nucleoside"
  modified_base 3: mod_base = OTHER; note = "2'-O-Methyl nucleoside"
  modified_base 5: mod_base = OTHER; note = "2'-O-Methyl nucleoside"
  modified_base 7: mod_base = OTHER; note = "2'-O-Methyl nucleoside"
  modified_base 9: mod_base = OTHER; note = "2'-O-Methyl nucleoside"
  modified_base 11: mod_base = OTHER; note = "2'-O-Methyl nucleoside"
  modified_base 13: mod_base = OTHER; note = "2'-O-Methyl nucleoside"
  modified_base 15: mod_base = OTHER; note = "2'-O-Methyl nucleoside"
  modified_base 17: mod_base = OTHER; note = "2'-O-Methyl nucleoside"
  modified_base 19: mod_base = OTHER; note = "2'-O-Methyl nucleoside"
  modified_base 21..26: mod_base = OTHER; note = "2'-O-Methyl nucleoside"
  modified_base 2..3: mod_base = OTHER; note = "phosphorothioate linked nucleoside"
  modified_base 22..23: mod_base = OTHER; note = "phosphorothioate linked nucleoside"
  modified_base 1: mod_base = OTHER; note = "vinyl phophonate modified nucleoside"
  source 1..26: mol_type = other RNA
taccaatttatgcctacagcctccgc

SEQ ID NO: 398 - RNA, 17 nt, synthetic construct
  modified_base 16..17: mod_base = OTHER; note = thymine
  misc_feature 1..17: note = HBV RNAi trigger antisense strand
  modified_base 2: mod_base = OTHER; note = "2'-deoxy-3'-fluoro nucleoside"
  modified_base 4: mod_base = OTHER; note = "2'-deoxy-3'-fluoro nucleoside"
  modified_base 6: mod_base = OTHER; note = "2'-deoxy-3'-fluoro nucleoside"
  modified_base 8: mod_base = OTHER; note = "2'-deoxy-3'-fluoro nucleoside"
  modified_base 10: mod_base = OTHER; note = "2'-deoxy-3'-fluoro nucleoside"
  modified_base 12: mod_base = OTHER; note = "2'-deoxy-3'-fluoro nucleoside"
  modified_base 14: mod_base = OTHER; note = "2'-deoxy-3'-fluoro nucleoside"
  modified_base 1: mod_base = OTHER; note = "2'-O-Methyl nucleoside"
  modified_base 3: mod_base = OTHER; note = "2'-O-Methyl nucleoside"
  modified_base 5: mod_base = OTHER; note = "2'-O-Methyl nucleoside"
  modified_base 7: mod_base = OTHER; note = "2'-O-Methyl nucleoside"
  modified_base 9: mod_base = OTHER; note = "2'-O-Methyl nucleoside"
  modified_base 11: mod_base = OTHER; note = "2'-O-Methyl nucleoside"
  modified_base 13: mod_base = OTHER; note = "2'-O-Methyl nucleoside"
  modified_base 15: mod_base = OTHER; note = "2'-O-Methyl nucleoside"
  modified_base 17: mod_base = OTHER; note = "phosphorothioate linked nucleoside"
  modified_base 16..17: mod_base = OTHER; note = thymine
  source 1..17: mol_type = other RNA
aatttatgcctacagtt

SEQ ID NO: 399 - RNA, 17 nt, synthetic construct
  modified_base 16..17: mod_base = OTHER; note = thymine
  misc_feature 1..17: note = HBV RNAi trigger antisense strand
  modified_base 2: mod_base = OTHER; note = "2'-deoxy-3'-fluoro nucleoside"
  modified_base 4: mod_base = OTHER; note = "2'-deoxy-3'-fluoro nucleoside"
  modified_base 6: mod_base = OTHER; note = "2'-deoxy-3'-fluoro nucleoside"
  modified_base 8: mod_base = OTHER; note = "2'-deoxy-3'-fluoro nucleoside"
  modified_base 10: mod_base = OTHER; note = "2'-deoxy-3'-fluoro nucleoside"
  modified_base 12: mod_base = OTHER; note = "2'-deoxy-3'-fluoro nucleoside"
  modified_base 14: mod_base = OTHER; note = "2'-deoxy-3'-fluoro nucleoside"
  modified_base 1: mod_base = OTHER; note = "2'-O-Methyl nucleoside"
  modified_base 3: mod_base = OTHER; note = "2'-O-Methyl nucleoside"
  modified_base 5: mod_base = OTHER; note = "2'-O-Methyl nucleoside"
  modified_base 7: mod_base = OTHER; note = "2'-O-Methyl nucleoside"
  modified_base 9: mod_base = OTHER; note = "2'-O-Methyl nucleoside"
  modified_base 11: mod_base = OTHER; note = "2'-O-Methyl nucleoside"
  modified_base 13: mod_base = OTHER; note = "2'-O-Methyl nucleoside"
  modified_base 15: mod_base = OTHER; note = "2'-O-Methyl nucleoside"
  modified_base 17: mod_base = OTHER; note = "phosphorothioate linked nucleoside"
  modified_base 16..17: mod_base = OTHER; note = thymine
  source 1..17: mol_type = other RNA
tgattaggcagaggttt

SEQ ID NO: 400 - RNA, 17 nt, synthetic construct
  modified_base 16..17: mod_base = OTHER; note = thymine
  misc_feature 1..17: note = HBV RNAi trigger antisense strand
  modified_base 2: mod_base = OTHER; note = "2'-deoxy-3'-fluoro nucleoside"
  modified_base 4: mod_base = OTHER; note = "2'-deoxy-3'-fluoro nucleoside"
  modified_base 6: mod_base = OTHER; note = "2'-deoxy-3'-fluoro nucleoside"
  modified_base 10: mod_base = OTHER; note = "2'-deoxy-3'-fluoro nucleoside"
  modified_base 12: mod_base = OTHER; note = "2'-deoxy-3'-fluoro nucleoside"
  modified_base 14: mod_base = OTHER; note = "2'-deoxy-3'-fluoro nucleoside"
  modified_base 1: mod_base = OTHER; note = "2'-O-Methyl nucleoside"
  modified_base 3: mod_base = OTHER; note = "2'-O-Methyl nucleoside"
  modified_base 5: mod_base = OTHER; note = "2'-O-Methyl nucleoside"
  modified_base 7..9: mod_base = OTHER; note = "2'-O-Methyl nucleoside"
  modified_base 11: mod_base = OTHER; note = "2'-O-Methyl nucleoside"
  modified_base 13: mod_base = OTHER; note = "2'-O-Methyl nucleoside"
  modified_base 15: mod_base = OTHER; note = "2'-O-Methyl nucleoside"
  modified_base 17: mod_base = OTHER; note = "phosphorothioate linked nucleoside"
  modified_base 16..17: mod_base = OTHER; note = thymine
  source 1..17: mol_type = other RNA
aatttatgcctacagtt

SEQ ID NO: 401 - RNA, 21 nt, synthetic construct
  misc_feature 1..21: note = HBV RNAi trigger antisense strand
  modified_base 2: mod_base = OTHER; note = "2'-deoxy-3'-fluoro nucleoside"
  modified_base 4: mod_base = OTHER; note = "2'-deoxy-3'-fluoro nucleoside"
  modified_base 6: mod_base = OTHER; note = "2'-deoxy-3'-fluoro nucleoside"
  modified_base 8: mod_base = OTHER; note = "2'-deoxy-3'-fluoro nucleoside"
  modified_base 10: mod_base = OTHER; note = "2'-deoxy-3'-fluoro nucleoside"
  modified_base 12: mod_base = OTHER; note = "2'-deoxy-3'-fluoro nucleoside"
  modified_base 14: mod_base = OTHER; note = "2'-deoxy-3'-fluoro nucleoside"
  modified_base 16: mod_base = OTHER; note = "2'-deoxy-3'-fluoro nucleoside"
  modified_base 18: mod_base = OTHER; note = "2'-deoxy-3'-fluoro nucleoside"
  modified_base 1: mod_base = OTHER; note = "2'-O-Methyl nucleoside"
  modified_base 3: mod_base = OTHER; note = "2'-O-Methyl nucleoside"
  modified_base 5: mod_base = OTHER; note = "2'-O-Methyl nucleoside"
  modified_base 7: mod_base = OTHER; note = "2'-O-Methyl nucleoside"
  modified_base 9: mod_base = OTHER; note = "2'-O-Methyl nucleoside"
  modified_base 11: mod_base = OTHER; note = "2'-O-Methyl nucleoside"
  modified_base 13: mod_base = OTHER; note = "2'-O-Methyl nucleoside"
  modified_base 15: mod_base = OTHER; note = "2'-O-Methyl nucleoside"
  modified_base 17: mod_base = OTHER; note = "2'-O-Methyl nucleoside"
  modified_base 19..21: mod_base = OTHER; note = "2'-O-Methyl nucleoside"
  modified_base 2..4: mod_base = OTHER; note = "phosphorothioate linked nucleoside"
  modified_base 21: mod_base = OTHER; note = "phosphorothioate linked nucleoside"
  source 1..21: mol_type = other RNA
taccaatttatgcctacagtt

SEQ ID NO: 402 - RNA, 21 nt, synthetic construct
  misc_feature 1..21: note = HBV RNAi trigger antisense strand
  modified_base 2: mod_base = OTHER; note = "2'-deoxy-3'-fluoro nucleoside"
  modified_base 4: mod_base = OTHER; note = "2'-deoxy-3'-fluoro nucleoside"
  modified_base 6: mod_base = OTHER; note = "2'-deoxy-3'-fluoro nucleoside"
  modified_base 8: mod_base = OTHER; note = "2'-deoxy-3'-fluoro nucleoside"
  modified_base 10: mod_base = OTHER; note = "2'-deoxy-3'-fluoro nucleoside"
  modified_base 12: mod_base = OTHER; note = "2'-deoxy-3'-fluoro nucleoside"
  modified_base 14: mod_base = OTHER; note = "2'-deoxy-3'-fluoro nucleoside"
  modified_base 16: mod_base = OTHER; note = "2'-deoxy-3'-fluoro nucleoside"
  modified_base 18: mod_base = OTHER; note = "2'-deoxy-3'-fluoro nucleoside"
  modified_base 1: mod_base = OTHER; note = "2'-O-Methyl nucleoside"
  modified_base 3: mod_base = OTHER; note = "2'-O-Methyl nucleoside"
  modified_base 5: mod_base = OTHER; note = "2'-O-Methyl nucleoside"
  modified_base 7: mod_base = OTHER; note = "2'-O-Methyl nucleoside"
  modified_base 9: mod_base = OTHER; note = "2'-O-Methyl nucleoside"
  modified_base 11: mod_base = OTHER; note = "2'-O-Methyl nucleoside"
  modified_base 13: mod_base = OTHER; note = "2'-O-Methyl nucleoside"
  modified_base 15: mod_base = OTHER; note = "2'-O-Methyl nucleoside"
  modified_base 17: mod_base = OTHER; note = "2'-O-Methyl nucleoside"
  modified_base 19..21: mod_base = OTHER; note = "2'-O-Methyl nucleoside"
  modified_base 2..4: mod_base = OTHER; note = "phosphorothioate linked nucleoside"
  modified_base 21: mod_base = OTHER; note = "phosphorothioate linked nucleoside"
  source 1..21: mol_type = other RNA
taccaatttatgcctacaggc

SEQ ID NO: 403 - RNA, 21 nt, synthetic construct
  misc_feature 1..21: note = HBV RNAi trigger antisense strand
  modified_base 2: mod_base = OTHER; note = "2'-deoxy-3'-fluoro nucleoside"
  modified_base 4: mod_base = OTHER; note = "2'-deoxy-3'-fluoro nucleoside"
  modified_base 6: mod_base = OTHER; note = "2'-deoxy-3'-fluoro nucleoside"
  modified_base 8: mod_base = OTHER; note = "2'-deoxy-3'-fluoro nucleoside"
  modified_base 10: mod_base = OTHER; note = "2'-deoxy-3'-fluoro nucleoside"
  modified_base 12: mod_base = OTHER; note = "2'-deoxy-3'-fluoro nucleoside"
  modified_base 14: mod_base = OTHER; note = "2'-deoxy-3'-fluoro nucleoside"
  modified_base 16: mod_base = OTHER; note = "2'-deoxy-3'-fluoro nucleoside"
  modified_base 18: mod_base = OTHER; note = "2'-deoxy-3'-fluoro nucleoside"
  modified_base 20: mod_base = OTHER; note = "2'-deoxy-3'-fluoro nucleoside"
  modified_base 1: mod_base = OTHER; note = "2'-O-Methyl nucleoside"
  modified_base 3: mod_base = OTHER; note = "2'-O-Methyl nucleoside"
  modified_base 5: mod_base = OTHER; note = "2'-O-Methyl nucleoside"
  modified_base 7: mod_base = OTHER; note = "2'-O-Methyl nucleoside"
  modified_base 9: mod_base = OTHER; note = "2'-O-Methyl nucleoside"
  modified_base 11: mod_base = OTHER; note = "2'-O-Methyl nucleoside"
  modified_base 13: mod_base = OTHER; note = "2'-O-Methyl nucleoside"
  modified_base 15: mod_base = OTHER; note = "2'-O-Methyl nucleoside"
  modified_base 17: mod_base = OTHER; note = "2'-O-Methyl nucleoside"
  modified_base 19: mod_base = OTHER; note = "2'-O-Methyl nucleoside"
  modified_base 21: mod_base = OTHER; note = "2'-O-Methyl nucleoside"
  modified_base 2..4: mod_base = OTHER; note = "phosphorothioate linked nucleoside"
  modified_base 21: mod_base = OTHER; note = "phosphorothioate linked nucleoside"
  modified_base 1: mod_base = OTHER; note = "vinyl phophonate modified nucleoside"
  source 1..21: mol_type = other RNA
taccaatttatgcctacaggc

SEQ ID NO: 404 - RNA, 21 nt, synthetic construct
  misc_feature 1..21: note = HBV RNAi trigger antisense strand
  modified_base 2: mod_base = OTHER; note = "2'-deoxy-3'-fluoro nucleoside"
  modified_base 4: mod_base = OTHER; note = "2'-deoxy-3'-fluoro nucleoside"
  modified_base 6: mod_base = OTHER; note = "2'-deoxy-3'-fluoro nucleoside"
  modified_base 8: mod_base = OTHER; note = "2'-deoxy-3'-fluoro nucleoside"
  modified_base 10: mod_base = OTHER; note = "2'-deoxy-3'-fluoro nucleoside"
  modified_base 12: mod_base = OTHER; note = "2'-deoxy-3'-fluoro nucleoside"
  modified_base 14: mod_base = OTHER; note = "2'-deoxy-3'-fluoro nucleoside"
  modified_base 16: mod_base = OTHER; note = "2'-deoxy-3'-fluoro nucleoside"
  modified_base 18: mod_base = OTHER; note = "2'-deoxy-3'-fluoro nucleoside"
  modified_base 1: mod_base = OTHER; note = "2'-O-Methyl nucleoside"
  modified_base 3: mod_base = OTHER; note = "2'-O-Methyl nucleoside"
  modified_base 5: mod_base = OTHER; note = "2'-O-Methyl nucleoside"
  modified_base 7: mod_base = OTHER; note = "2'-O-Methyl nucleoside"
  modified_base 9: mod_base = OTHER; note = "2'-O-Methyl nucleoside"
  modified_base 11: mod_base = OTHER; note = "2'-O-Methyl nucleoside"
  modified_base 13: mod_base = OTHER; note = "2'-O-Methyl nucleoside"
  modified_base 15: mod_base = OTHER; note = "2'-O-Methyl nucleoside"
  modified_base 17: mod_base = OTHER; note = "2'-O-Methyl nucleoside"
  modified_base 19..21: mod_base = OTHER; note = "2'-O-Methyl nucleoside"
  modified_base 2..4: mod_base = OTHER; note = "phosphorothioate linked nucleoside"
  modified_base 21: mod_base = OTHER; note = "phosphorothioate linked nucleoside"
  modified_base 1: mod_base = OTHER; note = "vinyl phophonate modified nucleoside"
  source 1..21: mol_type = other RNA
taccaatttatgcctacagtt

SEQ ID NO: 405 - RNA, 21 nt, synthetic construct
  misc_feature 1..21: note = HBV RNAi trigger antisense strand
  modified_base 2: mod_base = OTHER; note = "2'-deoxy-3'-fluoro nucleoside"
  modified_base 4: mod_base = OTHER; note = "2'-deoxy-3'-fluoro nucleoside"
  modified_base 6: mod_base = OTHER; note = "2'-deoxy-3'-fluoro nucleoside"
  modified_base 8: mod_base = OTHER; note = "2'-deoxy-3'-fluoro nucleoside"
  modified_base 10: mod_base = OTHER; note = "2'-deoxy-3'-fluoro nucleoside"
  modified_base 12: mod_base = OTHER; note = "2'-deoxy-3'-fluoro nucleoside"
  modified_base 14: mod_base = OTHER; note = "2'-deoxy-3'-fluoro nucleoside"
  modified_base 16: mod_base = OTHER; note = "2'-deoxy-3'-fluoro nucleoside"
  modified_base 18: mod_base = OTHER; note = "2'-deoxy-3'-fluoro nucleoside"
  modified_base 20: mod_base = OTHER; note = "2'-deoxy-3'-fluoro nucleoside"
  modified_base 1: mod_base = OTHER; note = "2'-O-Methyl nucleoside"
  modified_base 3: mod_base = OTHER; note = "2'-O-Methyl nucleoside"
  modified_base 5: mod_base = OTHER; note = "2'-O-Methyl nucleoside"
  modified_base 7: mod_base = OTHER; note = "2'-O-Methyl nucleoside"
  modified_base 9: mod_base = OTHER; note = "2'-O-Methyl nucleoside"
  modified_base 11: mod_base = OTHER; note = "2'-O-Methyl nucleoside"
  modified_base 13: mod_base = OTHER; note = "2'-O-Methyl nucleoside"
  modified_base 15: mod_base = OTHER; note = "2'-O-Methyl nucleoside"
  modified_base 17: mod_base = OTHER; note = "2'-O-Methyl nucleoside"
  modified_base 19: mod_base = OTHER; note = "2'-O-Methyl nucleoside"
  modified_base 21: mod_base = OTHER; note = "2'-O-Methyl nucleoside"
  modified_base 2..4: mod_base = OTHER; note = "phosphorothioate linked nucleoside"
  modified_base 21: mod_base = OTHER; note = "phosphorothioate linked nucleoside"
  source 1..21: mol_type = other RNA
attgagagaagtccaccacga

SEQ ID NO: 406 - RNA, 21 nt, synthetic construct
  misc_feature 1..21: note = HBV RNAi trigger antisense strand
  modified_base 2: mod_base = OTHER; note = "2'-deoxy-3'-fluoro nucleoside"
  modified_base 4: mod_base = OTHER; note = "2'-deoxy-3'-fluoro nucleoside"
  modified_base 6: mod_base = OTHER; note = "2'-deoxy-3'-fluoro nucleoside"
  modified_base 8: mod_base = OTHER; note = "2'-deoxy-3'-fluoro nucleoside"
  modified_base 10: mod_base = OTHER; note = "2'-deoxy-3'-fluoro nucleoside"
  modified_base 12: mod_base = OTHER; note = "2'-deoxy-3'-fluoro nucleoside"
  modified_base 14: mod_base = OTHER; note = "2'-deoxy-3'-fluoro nucleoside"
  modified_base 16: mod_base = OTHER; note = "2'-deoxy-3'-fluoro nucleoside"
  modified_base 18: mod_base = OTHER; note = "2'-deoxy-3'-fluoro nucleoside"
  modified_base 1: mod_base = OTHER; note = "2'-O-Methyl nucleoside"
  modified_base 3: mod_base = OTHER; note = "2'-O-Methyl nucleoside"
  modified_base 5: mod_base = OTHER; note = "2'-O-Methyl nucleoside"
  modified_base 7: mod_base = OTHER; note = "2'-O-Methyl nucleoside"
  modified_base 9: mod_base = OTHER; note = "2'-O-Methyl nucleoside"
  modified_base 11: mod_base = OTHER; note = "2'-O-Methyl nucleoside"
  modified_base 13: mod_base = OTHER; note = "2'-O-Methyl nucleoside"
  modified_base 15: mod_base = OTHER; note = "2'-O-Methyl nucleoside"
  modified_base 17: mod_base = OTHER; note = "2'-O-Methyl nucleoside"
  modified_base 19..21: mod_base = OTHER; note = "2'-O-Methyl nucleoside"
  modified_base 2..4: mod_base = OTHER; note = "phosphorothioate linked nucleoside"
  modified_base 21: mod_base = OTHER; note = "phosphorothioate linked nucleoside"
  source 1..21: mol_type = other RNA
attgagagaagtccaccacga

SEQ ID NO: 407 - RNA, 21 nt, synthetic construct
  misc_feature 1..21: note = HBV RNAi trigger antisense strand
  modified_base 2: mod_base = OTHER; note = "2'-deoxy-3'-fluoro nucleoside"
  modified_base 4: mod_base = OTHER; note = "2'-deoxy-3'-fluoro nucleoside"
  modified_base 6: mod_base = OTHER; note = "2'-deoxy-3'-fluoro nucleoside"
  modified_base 8: mod_base = OTHER; note = "2'-deoxy-3'-fluoro nucleoside"
  modified_base 10: mod_base = OTHER; note = "2'-deoxy-3'-fluoro nucleoside"
  modified_base 12: mod_base = OTHER; note = "2'-deoxy-3'-fluoro nucleoside"
  modified_base 14: mod_base = OTHER; note = "2'-deoxy-3'-fluoro nucleoside"
  modified_base 16: mod_base = OTHER; note = "2'-deoxy-3'-fluoro nucleoside"
  modified_base 18: mod_base = OTHER; note = "2'-deoxy-3'-fluoro nucleoside"
  modified_base 1: mod_base = OTHER; note = "2'-O-Methyl nucleoside"
  modified_base 3: mod_base = OTHER; note = "2'-O-Methyl nucleoside"
  modified_base 5: mod_base = OTHER; note = "2'-O-Methyl nucleoside"
  modified_base 7: mod_base = OTHER; note = "2'-O-Methyl nucleoside"
  modified_base 9: mod_base = OTHER; note = "2'-O-Methyl nucleoside"
  modified_base 11: mod_base = OTHER; note = "2'-O-Methyl nucleoside"
  modified_base 13: mod_base = OTHER; note = "2'-O-Methyl nucleoside"
  modified_base 15: mod_base = OTHER; note = "2'-O-Methyl nucleoside"
  modified_base 17: mod_base = OTHER; note = "2'-O-Methyl nucleoside"
  modified_base 19..21: mod_base = OTHER; note = "2'-O-Methyl nucleoside"
  modified_base 2..4: mod_base = OTHER; note = "phosphorothioate linked nucleoside"
  modified_base 21: mod_base = OTHER; note = "phosphorothioate linked nucleoside"
  source 1..21: mol_type = other RNA
attgagagaagtccaccactt

SEQ ID NO: 408 - RNA, 21 nt, synthetic construct
  misc_feature 1..21: note = HBV RNAi trigger antisense strand
  modified_base 2: mod_base = OTHER; note = "2'-deoxy-3'-fluoro nucleoside"
  modified_base 4: mod_base = OTHER; note = "2'-deoxy-3'-fluoro nucleoside"
  modified_base 6: mod_base = OTHER; note = "2'-deoxy-3'-fluoro nucleoside"
  modified_base 8: mod_base = OTHER; note = "2'-deoxy-3'-fluoro nucleoside"
  modified_base 10: mod_base = OTHER; note = "2'-deoxy-3'-fluoro nucleoside"
  modified_base 12: mod_base = OTHER; note = "2'-deoxy-3'-fluoro nucleoside"
  modified_base 14: mod_base = OTHER; note = "2'-deoxy-3'-fluoro nucleoside"
  modified_base 16: mod_base = OTHER; note = "2'-deoxy-3'-fluoro nucleoside"
  modified_base 18: mod_base = OTHER; note = "2'-deoxy-3'-fluoro nucleoside"
  modified_base 20: mod_base = OTHER; note = "2'-deoxy-3'-fluoro nucleoside"
  modified_base 1: mod_base = OTHER; note = "2'-O-Methyl nucleoside"
  modified_base 3: mod_base = OTHER; note = "2'-O-Methyl nucleoside"
  modified_base 5: mod_base = OTHER; note = "2'-O-Methyl nucleoside"
  modified_base 7: mod_base = OTHER; note = "2'-O-Methyl nucleoside"
  modified_base 9: mod_base = OTHER; note = "2'-O-Methyl nucleoside"
  modified_base 11: mod_base = OTHER; note = "2'-O-Methyl nucleoside"
  modified_base 13: mod_base = OTHER; note = "2'-O-Methyl nucleoside"
  modified_base 15: mod_base = OTHER; note = "2'-O-Methyl nucleoside"
  modified_base 17: mod_base = OTHER; note = "2'-O-Methyl nucleoside"
  modified_base 19: mod_base = OTHER; note = "2'-O-Methyl nucleoside"
  modified_base 21: mod_base = OTHER; note = "2'-O-Methyl nucleoside"
  modified_base 2..4: mod_base = OTHER; note = "phosphorothioate linked nucleoside"
  modified_base 21: mod_base = OTHER; note = "phosphorothioate linked nucleoside"
  modified_base 1: mod_base = OTHER; note = "vinyl phophonate modified nucleoside"
  source 1..21: mol_type = other RNA
tttgagagaagtccaccacga

SEQ ID NO: 409 - RNA, 21 nt, synthetic construct
  misc_feature 1..21: note = HBV RNAi trigger antisense strand
  modified_base 2: mod_base = OTHER; note = "2'-deoxy-3'-fluoro nucleoside"
  modified_base 4: mod_base = OTHER; note = "2'-deoxy-3'-fluoro nucleoside"
  modified_base 6: mod_base = OTHER; note = "2'-deoxy-3'-fluoro nucleoside"
  modified_base 8: mod_base = OTHER; note = "2'-deoxy-3'-fluoro nucleoside"
  modified_base 10: mod_base = OTHER; note = "2'-deoxy-3'-fluoro nucleoside"
  modified_base 12: mod_base = OTHER; note = "2'-deoxy-3'-fluoro nucleoside"
  modified_base 14: mod_base = OTHER; note = "2'-deoxy-3'-fluoro nucleoside"
  modified_base 16: mod_base = OTHER; note = "2'-deoxy-3'-fluoro nucleoside"
  modified_base 18: mod_base = OTHER; note = "2'-deoxy-3'-fluoro nucleoside"
  modified_base 20: mod_base = OTHER; note = "2'-deoxy-3'-fluoro nucleoside"
  modified_base 1: mod_base = OTHER; note = "2'-O-Methyl nucleoside"
  modified_base 3: mod_base = OTHER; note = "2'-O-Methyl nucleoside"
  modified_base 5: mod_base = OTHER; note = "2'-O-Methyl nucleoside"
  modified_base 7: mod_base = OTHER; note = "2'-O-Methyl nucleoside"
  modified_base 9: mod_base = OTHER; note = "2'-O-Methyl nucleoside"
  modified_base 11: mod_base = OTHER; note = "2'-O-Methyl nucleoside"
  modified_base 13: mod_base = OTHER; note = "2'-O-Methyl nucleoside"
  modified_base 15: mod_base = OTHER; note = "2'-O-Methyl nucleoside"
  modified_base 17: mod_base = OTHER; note = "2'-O-Methyl nucleoside"
  modified_base 19: mod_base = OTHER; note = "2'-O-Methyl nucleoside"
  modified_base 21: mod_base = OTHER; note = "2'-O-Methyl nucleoside"
  modified_base 2..4: mod_base = OTHER; note = "phosphorothioate linked nucleoside"
  modified_base 21: mod_base = OTHER; note = "phosphorothioate linked nucleoside"
  source 1..21: mol_type = other RNA
aattgagagaagtccaccacg

SEQ ID NO: 410 - RNA, 21 nt, synthetic construct
  misc_feature 1..21: note = HBV RNAi trigger antisense strand
  modified_base 2: mod_base = OTHER; note = "2'-deoxy-3'-fluoro nucleoside"
  modified_base 4: mod_base = OTHER; note = "2'-deoxy-3'-fluoro nucleoside"
  modified_base 6: mod_base = OTHER; note = "2'-deoxy-3'-fluoro nucleoside"
  modified_base 8: mod_base = OTHER; note = "2'-deoxy-3'-fluoro nucleoside"
  modified_base 10: mod_base = OTHER; note = "2'-deoxy-3'-fluoro nucleoside"
  modified_base 12: mod_base = OTHER; note = "2'-deoxy-3'-fluoro nucleoside"
  modified_base 14: mod_base = OTHER; note = "2'-deoxy-3'-fluoro nucleoside"
  modified_base 16: mod_base = OTHER; note = "2'-deoxy-3'-fluoro nucleoside"
  modified_base 18: mod_base = OTHER; note = "2'-deoxy-3'-fluoro nucleoside"
  modified_base 1: mod_base = OTHER; note = "2'-O-Methyl nucleoside"
  modified_base 3: mod_base = OTHER; note = "2'-O-Methyl nucleoside"
  modified_base 5: mod_base = OTHER; note = "2'-O-Methyl nucleoside"
  modified_base 7: mod_base = OTHER; note = "2'-O-Methyl nucleoside"
  modified_base 9: mod_base = OTHER; note = "2'-O-Methyl nucleoside"
  modified_base 11: mod_base = OTHER; note = "2'-O-Methyl nucleoside"
  modified_base 13: mod_base = OTHER; note = "2'-O-Methyl nucleoside"
  modified_base 15: mod_base = OTHER; note = "2'-O-Methyl nucleoside"
  modified_base 17: mod_base = OTHER; note = "2'-O-Methyl nucleoside"
  modified_base 19..21: mod_base = OTHER; note = "2'-O-Methyl nucleoside"
  modified_base 2..4: mod_base = OTHER; note = "phosphorothioate linked nucleoside"
  modified_base 21: mod_base = OTHER; note = "phosphorothioate linked nucleoside"
  source 1..21: mol_type = other RNA
aattgagagaagtccaccacg

SEQ ID NO: 411 - RNA, 21 nt, synthetic construct
  misc_feature 1..21: note = HBV RNAi trigger antisense strand
  modified_base 2: mod_base = OTHER; note = "2'-deoxy-3'-fluoro nucleoside"
  modified_base 4: mod_base = OTHER; note = "2'-deoxy-3'-fluoro nucleoside"
  modified_base 6: mod_base = OTHER; note = "2'-deoxy-3'-fluoro nucleoside"
  modified_base 8: mod_base = OTHER; note = "2'-deoxy-3'-fluoro nucleoside"
  modified_base 10: mod_base = OTHER; note = "2'-deoxy-3'-fluoro nucleoside"
  modified_base 12: mod_base = OTHER; note = "2'-deoxy-3'-fluoro nucleoside"
  modified_base 14: mod_base = OTHER; note = "2'-deoxy-3'-fluoro nucleoside"
  modified_base 16: mod_base = OTHER; note = "2'-deoxy-3'-fluoro nucleoside"
  modified_base 18: mod_base = OTHER; note = "2'-deoxy-3'-fluoro nucleoside"
  modified_base 1: mod_base = OTHER; note = "2'-O-Methyl nucleoside"
  modified_base 3: mod_base = OTHER; note = "2'-O-Methyl nucleoside"
  modified_base 5: mod_base = OTHER; note = "2'-O-Methyl nucleoside"
  modified_base 7: mod_base = OTHER; note = "2'-O-Methyl nucleoside"
  modified_base 9: mod_base = OTHER; note = "2'-O-Methyl nucleoside"
  modified_base 11: mod_base = OTHER; note = "2'-O-Methyl nucleoside"
  modified_base 13: mod_base = OTHER; note = "2'-O-Methyl nucleoside"
  modified_base 15: mod_base = OTHER; note = "2'-O-Methyl nucleoside"
  modified_base 17: mod_base = OTHER; note = "2'-O-Methyl nucleoside"
  modified_base 19..21: mod_base = OTHER; note = "2'-O-Methyl nucleoside"
  modified_base 2..4: mod_base = OTHER; note = "phosphorothioate linked nucleoside"
  modified_base 21: mod_base = OTHER; note = "phosphorothioate linked nucleoside"
  source 1..21: mol_type = other RNA
aattgagagaagtccaccatt

SEQ ID NO: 412 - RNA, 21 nt, synthetic construct
  misc_feature 1..21: note = HBV RNAi trigger antisense strand
  modified_base 2: mod_base = OTHER; note = "2'-deoxy-3'-fluoro nucleoside"
  modified_base 4: mod_base = OTHER; note = "2'-deoxy-3'-fluoro nucleoside"
  modified_base 6: mod_base = OTHER; note = "2'-deoxy-3'-fluoro nucleoside"
  modified_base 8: mod_base = OTHER; note = "2'-deoxy-3'-fluoro nucleoside"
  modified_base 10: mod_base = OTHER; note = "2'-deoxy-3'-fluoro nucleoside"
  modified_base 12: mod_base = OTHER; note = "2'-deoxy-3'-fluoro nucleoside"
  modified_base 14: mod_base = OTHER; note = "2'-deoxy-3'-fluoro nucleoside"
  modified_base 16: mod_base = OTHER; note = "2'-deoxy-3'-fluoro nucleoside"
  modified_base 18: mod_base = OTHER; note = "2'-deoxy-3'-fluoro nucleoside"
  modified_base 20: mod_base = OTHER; note = "2'-deoxy-3'-fluoro nucleoside"
  modified_base 1: mod_base = OTHER; note = "2'-O-Methyl nucleoside"
  modified_base 3: mod_base = OTHER; note = "2'-O-Methyl nucleoside"
  modified_base 5: mod_base = OTHER; note = "2'-O-Methyl nucleoside"
  modified_base 7: mod_base = OTHER; note = "2'-O-Methyl nucleoside"
  modified_base 9: mod_base = OTHER; note = "2'-O-Methyl nucleoside"
  modified_base 11: mod_base = OTHER; note = "2'-O-Methyl nucleoside"
  modified_base 13: mod_base = OTHER; note = "2'-O-Methyl nucleoside"
  modified_base 15: mod_base = OTHER; note = "2'-O-Methyl nucleoside"
  modified_base 17: mod_base = OTHER; note = "2'-O-Methyl nucleoside"
  modified_base 19: mod_base = OTHER; note = "2'-O-Methyl nucleoside"
  modified_base 21: mod_base = OTHER; note = "2'-O-Methyl nucleoside"
  modified_base 2..4: mod_base = OTHER; note = "phosphorothioate linked nucleoside"
  modified_base 21: mod_base = OTHER; note = "phosphorothioate linked nucleoside"
  modified_base 1: mod_base = OTHER; note = "vinyl phophonate modified nucleoside"
  source 1..21: mol_type = other RNA
tattgagagaagtccaccacg

SEQ ID NO: 413 - RNA, 21 nt, synthetic construct
  misc_feature 1..21: note = HBV RNAi trigger antisense strand
  modified_base 2: mod_base = OTHER; note = "2'-deoxy-3'-fluoro nucleoside"
  modified_base 4: mod_base = OTHER; note = "2'-deoxy-3'-fluoro nucleoside"
  modified_base 6: mod_base = OTHER; note = "2'-deoxy-3'-fluoro nucleoside"
  modified_base 8: mod_base = OTHER; note = "2'-deoxy-3'-fluoro nucleoside"
  modified_base 10: mod_base = OTHER; note = "2'-deoxy-3'-fluoro nucleoside"
  modified_base 12: mod_base = OTHER; note = "2'-deoxy-3'-fluoro nucleoside"
  modified_base 14: mod_base = OTHER; note = "2'-deoxy-3'-fluoro nucleoside"
  modified_base 16: mod_base = OTHER; note = "2'-deoxy-3'-fluoro nucleoside"
  modified_base 18: mod_base = OTHER; note = "2'-deoxy-3'-fluoro nucleoside"
  modified_base 20: mod_base = OTHER; note = "2'-deoxy-3'-fluoro nucleoside"
  modified_base 1: mod_base = OTHER; note = "2'-O-Methyl nucleoside"
  modified_base 3: mod_base = OTHER; note = "2'-O-Methyl nucleoside"
  modified_base 5: mod_base = OTHER; note = "2'-O-Methyl nucleoside"
  modified_base 7: mod_base = OTHER; note = "2'-O-Methyl nucleoside"
  modified_base 9: mod_base = OTHER; note = "2'-O-Methyl nucleoside"
  modified_base 11: mod_base = OTHER; note = "2'-O-Methyl nucleoside"
  modified_base 13: mod_base = OTHER; note = "2'-O-Methyl nucleoside"
  modified_base 15: mod_base = OTHER; note = "2'-O-Methyl nucleoside"
  modified_base 17: mod_base = OTHER; note = "2'-O-Methyl nucleoside"
  modified_base 19: mod_base = OTHER; note = "2'-O-Methyl nucleoside"
  modified_base 21: mod_base = OTHER; note = "2'-O-Methyl nucleoside"
  modified_base 2..4: mod_base = OTHER; note = "phosphorothioate linked nucleoside"
  modified_base 21: mod_base = OTHER; note = "phosphorothioate linked nucleoside"
  source 1..21: mol_type = other RNA
ttagaaaattgagagaagtcc

SEQ ID NO: 414 - RNA, 21 nt, synthetic construct
  misc_feature 1..21: note = HBV RNAi trigger antisense strand
  modified_base 2: mod_base = OTHER; note = "2'-deoxy-3'-fluoro nucleoside"
  modified_base 4: mod_base = OTHER; note = "2'-deoxy-3'-fluoro nucleoside"
  modified_base 6: mod_base = OTHER; note = "2'-deoxy-3'-fluoro nucleoside"
  modified_base 8: mod_base = OTHER; note = "2'-deoxy-3'-fluoro nucleoside"
  modified_base 10: mod_base = OTHER; note = "2'-deoxy-3'-fluoro nucleoside"
  modified_base 12: mod_base = OTHER; note = "2'-deoxy-3'-fluoro nucleoside"
  modified_base 14: mod_base = OTHER; note = "2'-deoxy-3'-fluoro nucleoside"
  modified_base 16: mod_base = OTHER; note = "2'-deoxy-3'-fluoro nucleoside"
  modified_base 18: mod_base = OTHER; note = "2'-deoxy-3'-fluoro nucleoside"
  modified_base 20: mod_base = OTHER; note = "2'-deoxy-3'-fluoro nucleoside"
  modified_base 1: mod_base = OTHER; note = "2'-O-Methyl nucleoside"
  modified_base 3: mod_base = OTHER; note = "2'-O-Methyl nucleoside"
  modified_base 5: mod_base = OTHER; note = "2'-O-Methyl nucleoside"
  modified_base 7: mod_base = OTHER; note = "2'-O-Methyl nucleoside"
  modified_base 9: mod_base = OTHER; note = "2'-O-Methyl nucleoside"
  modified_base 11: mod_base = OTHER; note = "2'-O-Methyl nucleoside"
  modified_base 13: mod_base = OTHER; note = "2'-O-Methyl nucleoside"
  modified_base 15: mod_base = OTHER; note = "2'-O-Methyl nucleoside"
  modified_base 17: mod_base = OTHER; note = "2'-O-Methyl nucleoside"
  modified_base 19: mod_base = OTHER; note = "2'-O-Methyl nucleoside"
  modified_base 21: mod_base = OTHER; note = "2'-O-Methyl nucleoside"
  modified_base 2..4: mod_base = OTHER; note = "phosphorothioate linked nucleoside"
  modified_base 21: mod_base = OTHER; note = "phosphorothioate linked nucleoside"
  modified_base 1: mod_base = OTHER; note = "vinyl phophonate modified nucleoside"
  source 1..21: mol_type = other RNA
ttagaaaattgagagaagtcc

SEQ ID NO: 415 - RNA, 23 nt, synthetic construct
  modified_base 23: mod_base = OTHER; note = thymine
  misc_feature 1..23: note = HBV RNAi trigger sense strand
  modified_base 2: mod_base = OTHER; note = "2'-hydroxy nucleoside"
  modified_base 4: mod_base = OTHER; note = "2'-deoxy-3'-fluoro nucleoside"
  modified_base 6: mod_base = OTHER; note = "2'-deoxy-3'-fluoro nucleoside"
  modified_base 8: mod_base = OTHER; note = "2'-deoxy-3'-fluoro nucleoside"
  modified_base 10: mod_base = OTHER; note = "2'-deoxy-3'-fluoro nucleoside"
  modified_base 12: mod_base = OTHER; note = "2'-deoxy-3'-fluoro nucleoside"
  modified_base 14: mod_base = OTHER; note = "2'-deoxy-3'-fluoro nucleoside"
  modified_base 16: mod_base = OTHER; note = "2'-deoxy-3'-fluoro nucleoside"
  modified_base 18: mod_base = OTHER; note = "2'-deoxy-3'-fluoro nucleoside"
  modified_base 20: mod_base = OTHER; note = "2'-deoxy-3'-fluoro nucleoside"
  modified_base 22: mod_base = OTHER; note = "2'-deoxy-3'-fluoro nucleoside"
  modified_base 1: mod_base = OTHER; note = "2'-O-Methyl nucleoside"
  modified_base 3: mod_base = OTHER; note = "2'-O-Methyl nucleoside"
  modified_base 5: mod_base = OTHER; note = "2'-O-Methyl nucleoside"
  modified_base 7: mod_base = OTHER; note = "2'-O-Methyl nucleoside"
  modified_base 9: mod_base = OTHER; note = "2'-O-Methyl nucleoside"
  modified_base 11: mod_base = OTHER; note = "2'-O-Methyl nucleoside"
  modified_base 13: mod_base = OTHER; note = "2'-O-Methyl nucleoside"
  modified_base 15: mod_base = OTHER; note = "2'-O-Methyl nucleoside"
  modified_base 17: mod_base = OTHER; note = "2'-O-Methyl nucleoside"
  modified_base 19: mod_base = OTHER; note = "2'-O-Methyl nucleoside"
  modified_base 21: mod_base = OTHER; note = "2'-O-Methyl nucleoside"
  modified_base 23: mod_base = OTHER; note = "inverted nucleotide"
  modified_base 1: mod_base = OTHER; note = "Chol-ALNY modifed nucleoside"
  modified_base 23: mod_base = OTHER; note = thymine
  source 1..23: mol_type = other RNA
tatctgtaggcataaattggtat

SEQ ID NO: 416 - RNA, 23 nt, synthetic construct
  modified_base 23: mod_base = OTHER; note = thymine
  misc_feature 1..23: note = HBV RNAi trigger sense strand
  modified_base 2: mod_base = OTHER; note = "2'-hydroxy nucleoside"
  modified_base 4: mod_base = OTHER; note = "2'-deoxy-3'-fluoro nucleoside"
  modified_base 6: mod_base = OTHER; note = "2'-deoxy-3'-fluoro nucleoside"
  modified_base 8: mod_base = OTHER; note = "2'-deoxy-3'-fluoro nucleoside"
  modified_base 10: mod_base = OTHER; note = "2'-deoxy-3'-fluoro nucleoside"
  modified_base 12: mod_base = OTHER; note = "2'-deoxy-3'-fluoro nucleoside"
  modified_base 14: mod_base = OTHER; note = "2'-deoxy-3'-fluoro nucleoside"
  modified_base 16: mod_base = OTHER; note = "2'-deoxy-3'-fluoro nucleoside"
  modified_base 18: mod_base = OTHER; note = "2'-deoxy-3'-fluoro nucleoside"
  modified_base 20: mod_base = OTHER; note = "2'-deoxy-3'-fluoro nucleoside"
  modified_base 22: mod_base = OTHER; note = "2'-deoxy-3'-fluoro nucleoside"
  modified_base 1: mod_base = OTHER; note = "2'-O-Methyl nucleoside"
  modified_base 3: mod_base = OTHER; note = "2'-O-Methyl nucleoside"
  modified_base 5: mod_base = OTHER; note = "2'-O-Methyl nucleoside"
  modified_base 7: mod_base = OTHER; note = "2'-O-Methyl nucleoside"
  modified_base 9: mod_base = OTHER; note = "2'-O-Methyl nucleoside"
  modified_base 11: mod_base = OTHER; note = "2'-O-Methyl nucleoside"
  modified_base 13: mod_base = OTHER; note = "2'-O-Methyl nucleoside"
  modified_base 15: mod_base = OTHER; note = "2'-O-Methyl nucleoside"
  modified_base 17: mod_base = OTHER; note = "2'-O-Methyl nucleoside"
  modified_base 19: mod_base = OTHER; note = "2'-O-Methyl nucleoside"
  modified_base 21: mod_base = OTHER; note = "2'-O-Methyl nucleoside"
  modified_base 23: mod_base = OTHER; note = "inverted nucleotide"
  modified_base 1: mod_base = OTHER; note = "Chol-ALNY modifed nucleoside"
  modified_base 23: mod_base = OTHER; note = thymine
  source 1..23: mol_type = other RNA
tattctgcggcgttttatcatat

SEQ ID NO: 417 - RNA, 23 nt, synthetic construct
  modified_base 23: mod_base = OTHER; note = thymine
  misc_feature 1..23: note = HBV RNAi trigger sense strand
  modified_base 2: mod_base = OTHER; note = "2'-hydroxy nucleoside"
  modified_base 4: mod_base = OTHER; note = "2'-deoxy-3'-fluoro nucleoside"
  modified_base 6: mod_base = OTHER; note = "2'-deoxy-3'-fluoro nucleoside"
  modified_base 8: mod_base = OTHER; note = "2'-deoxy-3'-fluoro nucleoside"
  modified_base 10: mod_base = OTHER; note = "2'-deoxy-3'-fluoro nucleoside"
  modified_base 12: mod_base = OTHER; note = "2'-deoxy-3'-fluoro nucleoside"
  modified_base 14: mod_base = OTHER; note = "2'-deoxy-3'-fluoro nucleoside"
  modified_base 16: mod_base = OTHER; note = "2'-deoxy-3'-fluoro nucleoside"
  modified_base 18: mod_base = OTHER; note = "2'-deoxy-3'-fluoro nucleoside"
  modified_base 20: mod_base = OTHER; note = "2'-deoxy-3'-fluoro nucleoside"
  modified_base 22: mod_base = OTHER; note = "2'-deoxy-3'-fluoro nucleoside"
  modified_base 1: mod_base = OTHER; note = "2'-O-Methyl nucleoside"
  modified_base 3: mod_base = OTHER; note = "2'-O-Methyl nucleoside"
  modified_base 5: mod_base = OTHER; note = "2'-O-Methyl nucleoside"
  modified_base 7: mod_base = OTHER; note = "2'-O-Methyl nucleoside"
  modified_base 9: mod_base = OTHER; note = "2'-O-Methyl nucleoside"
  modified_base 11: mod_base = OTHER; note = "2'-O-Methyl nucleoside"
  modified_base 13: mod_base = OTHER; note = "2'-O-Methyl nucleoside"
  modified_base 15: mod_base = OTHER; note = "2'-O-Methyl nucleoside"
  modified_base 17: mod_base = OTHER; note = "2'-O-Methyl nucleoside"
  modified_base 19: mod_base = OTHER; note = "2'-O-Methyl nucleoside"
  modified_base 21: mod_base = OTHER; note = "2'-O-Methyl nucleoside"
  modified_base 23: mod_base = OTHER; note = "inverted nucleotide"
  modified_base 1: mod_base = OTHER; note = "Chol-ALNY modifed nucleoside"
  modified_base 23: mod_base = OTHER; note = thymine
  source 1..23: mol_type = other RNA
tatacctctgcctaatcatctat

SEQ ID NO: 418 - RNA, 23 nt, synthetic construct
  modified_base 23: mod_base = OTHER; note = thymine
  misc_feature 1..23: note = HBV RNAi trigger sense strand
  modified_base 2: mod_base = OTHER; note = "2'-hydroxy nucleoside"
  modified_base 4: mod_base = OTHER; note = "2'-deoxy-3'-fluoro nucleoside"
  modified_base 6: mod_base = OTHER; note = "2'-deoxy-3'-fluoro nucleoside"
  modified_base 8: mod_base = OTHER; note = "2'-deoxy-3'-fluoro nucleoside"
  modified_base 10: mod_base = OTHER; note = "2'-deoxy-3'-fluoro nucleoside"
  modified_base 12: mod_base = OTHER; note = "2'-deoxy-3'-fluoro nucleoside"
  modified_base 14: mod_base = OTHER; note = "2'-deoxy-3'-fluoro nucleoside"
  modified_base 16: mod_base = OTHER; note = "2'-deoxy-3'-fluoro nucleoside"
  modified_base 18: mod_base = OTHER; note = "2'-deoxy-3'-fluoro nucleoside"
  modified_base 20: mod_base = OTHER; note = "2'-deoxy-3'-fluoro nucleoside"
  modified_base 22: mod_base = OTHER; note = "2'-deoxy-3'-fluoro nucleoside"
  modified_base 1: mod_base = OTHER; note = "2'-O-Methyl nucleoside"
  modified_base 3: mod_base = OTHER; note = "2'-O-Methyl nucleoside"
  modified_base 5: mod_base = OTHER; note = "2'-O-Methyl nucleoside"
  modified_base 7: mod_base = OTHER; note = "2'-O-Methyl nucleoside"
  modified_base 9: mod_base = OTHER; note = "2'-O-Methyl nucleoside"
  modified_base 11: mod_base = OTHER; note = "2'-O-Methyl nucleoside"
  modified_base 13: mod_base = OTHER; note = "2'-O-Methyl nucleoside"
  modified_base 15: mod_base = OTHER; note = "2'-O-Methyl nucleoside"
  modified_base 17: mod_base = OTHER; note = "2'-O-Methyl nucleoside"
  modified_base 19: mod_base = OTHER; note = "2'-O-Methyl nucleoside"
  modified_base 21: mod_base = OTHER; note = "2'-O-Methyl nucleoside"
  modified_base 23: mod_base = OTHER; note = "inverted nucleotide"
  modified_base 1: mod_base = OTHER; note = "Toc modifed nucleoside"
  modified_base 23: mod_base = OTHER; note = thymine
  source 1..23: mol_type = other RNA
tatacctctgcctaatcatctat

SEQ ID NO: 419 - RNA, 23 nt, synthetic construct
  modified_base 23: mod_base = OTHER; note = thymine
  misc_feature 1..23: note = HBV RNAi trigger sense strand
  modified_base 2: mod_base = OTHER; note = "2'-hydroxy nucleoside"
  modified_base 4: mod_base = OTHER; note = "2'-deoxy-3'-fluoro nucleoside"
  modified_base 6: mod_base = OTHER; note = "2'-deoxy-3'-fluoro nucleoside"
  modified_base 8: mod_base = OTHER; note = "2'-deoxy-3'-fluoro nucleoside"
  modified_base 10: mod_base = OTHER; note = "2'-deoxy-3'-fluoro nucleoside"
  modified_base 12: mod_base = OTHER; note = "2'-deoxy-3'-fluoro nucleoside"
  modified_base 14: mod_base = OTHER; note = "2'-deoxy-3'-fluoro nucleoside"
  modified_base 16: mod_base = OTHER; note = "2'-deoxy-3'-fluoro nucleoside"
  modified_base 18: mod_base = OTHER; note = "2'-deoxy-3'-fluoro nucleoside"
  modified_base 20: mod_base = OTHER; note = "2'-deoxy-3'-fluoro nucleoside"
  modified_base 22: mod_base = OTHER; note = "2'-deoxy-3'-fluoro nucleoside"
  modified_base 1: mod_base = OTHER; note = "2'-O-Methyl nucleoside"
  modified_base 3: mod_base = OTHER; note = "2'-O-Methyl nucleoside"
  modified_base 5: mod_base = OTHER; note = "2'-O-Methyl nucleoside"
  modified_base 7: mod_base = OTHER; note = "2'-O-Methyl nucleoside"
  modified_base 9: mod_base = OTHER; note = "2'-O-Methyl nucleoside"
  modified_base 11: mod_base = OTHER; note = "2'-O-Methyl nucleoside"
  modified_base 13: mod_base = OTHER; note = "2'-O-Methyl nucleoside"
  modified_base 15: mod_base = OTHER; note = "2'-O-Methyl nucleoside"
  modified_base 17: mod_base = OTHER; note = "2'-O-Methyl nucleoside"
  modified_base 19: mod_base = OTHER; note = "2'-O-Methyl nucleoside"
  modified_base 21: mod_base = OTHER; note = "2'-O-Methyl nucleoside"
  modified_base 23: mod_base = OTHER; note = "inverted nucleotide"
  modified_base 1: mod_base = OTHER; note = "Chol-TEG modifed nucleoside"
  modified_base 23: mod_base = OTHER; note = thymine
  source 1..23: mol_type = other RNA
tatacctctgcctaatcatctat

SEQ ID NO: 420 - RNA, 23 nt, synthetic construct
  modified_base 23: mod_base = OTHER; note = thymine
  misc_feature 1..23: note = HBV RNAi trigger sense strand
  modified_base 2: mod_base = OTHER; note = "2'-hydroxy nucleoside"
  modified_base 4: mod_base = OTHER; note = "2'-deoxy-3'-fluoro nucleoside"
  modified_base 6: mod_base = OTHER; note = "2'-deoxy-3'-fluoro nucleoside"
  modified_base 8: mod_base = OTHER; note = "2'-deoxy-3'-fluoro nucleoside"
  modified_base 10: mod_base = OTHER; note = "2'-deoxy-3'-fluoro nucleoside"
  modified_base 12: mod_base = OTHER; note = "2'-deoxy-3'-fluoro nucleoside"
  modified_base 14: mod_base = OTHER; note = "2'-deoxy-3'-fluoro nucleoside"
  modified_base 16: mod_base = OTHER; note = "2'-deoxy-3'-fluoro nucleoside"
  modified_base 18: mod_base = OTHER; note = "2'-deoxy-3'-fluoro nucleoside"
  modified_base 20: mod_base = OTHER; note = "2'-deoxy-3'-fluoro nucleoside"
  modified_base 22: mod_base = OTHER; note = "2'-deoxy-3'-fluoro nucleoside"
  modified_base 1: mod_base = OTHER; note = "2'-O-Methyl nucleoside"
  modified_base 3: mod_base = OTHER; note = "2'-O-Methyl nucleoside"
  modified_base 5: mod_base = OTHER; note = "2'-O-Methyl nucleoside"
  modified_base 7: mod_base = OTHER; note = "2'-O-Methyl nucleoside"
  modified_base 9: mod_base = OTHER; note = "2'-O-Methyl nucleoside"
  modified_base 11: mod_base = OTHER; note = "2'-O-Methyl nucleoside"
  modified_base 13: mod_base = OTHER; note = "2'-O-Methyl nucleoside"
  modified_base 15: mod_base = OTHER; note = "2'-O-Methyl nucleoside"
  modified_base 17: mod_base = OTHER; note = "2'-O-Methyl nucleoside"
  modified_base 19: mod_base = OTHER; note = "2'-O-Methyl nucleoside"
  modified_base 21: mod_base = OTHER; note = "2'-O-Methyl nucleoside"
  modified_base 23: mod_base = OTHER; note = "inverted nucleotide"
  modified_base 1: mod_base = OTHER; note = "Chol-C6 modified nucleoside"
  modified_base 23: mod_base = OTHER; note = thymine
  source 1..23: mol_type = other RNA
tatctgtaggcataaattggtat

SEQ ID NO: 421 - RNA, 23 nt, synthetic construct
  modified_base 23: mod_base = OTHER; note = thymine
  misc_feature 1..23: note = HBV RNAi trigger sense strand
  modified_base 2: mod_base = OTHER; note = "2'-hydroxy nucleoside"
  modified_base 4: mod_base = OTHER; note = "2'-deoxy-3'-fluoro nucleoside"
  modified_base 6: mod_base = OTHER; note = "2'-deoxy-3'-fluoro nucleoside"
  modified_base 8: mod_base = OTHER; note = "2'-deoxy-3'-fluoro nucleoside"
  modified_base 10: mod_base = OTHER; note = "2'-deoxy-3'-fluoro nucleoside"
  modified_base 12: mod_base = OTHER; note = "2'-deoxy-3'-fluoro nucleoside"
  modified_base 14: mod_base = OTHER; note = "2'-deoxy-3'-fluoro nucleoside"
  modified_base 16: mod_base = OTHER; note = "2'-deoxy-3'-fluoro nucleoside"
  modified_base 18: mod_base = OTHER; note = "2'-deoxy-3'-fluoro nucleoside"
  modified_base 20: mod_base = OTHER; note = "2'-deoxy-3'-fluoro nucleoside"
  modified_base 22: mod_base = OTHER; note = "2'-deoxy-3'-fluoro nucleoside"
  modified_base 1: mod_base = OTHER; note = "2'-O-Methyl nucleoside"
  modified_base 3: mod_base = OTHER; note = "2'-O-Methyl nucleoside"
  modified_base 5: mod_base = OTHER; note = "2'-O-Methyl nucleoside"
  modified_base 7: mod_base = OTHER; note = "2'-O-Methyl nucleoside"
  modified_base 9: mod_base = OTHER; note = "2'-O-Methyl nucleoside"
  modified_base 11: mod_base = OTHER; note = "2'-O-Methyl nucleoside"
  modified_base 13: mod_base = OTHER; note = "2'-O-Methyl nucleoside"
  modified_base 15: mod_base = OTHER; note = "2'-O-Methyl nucleoside"
  modified_base 17: mod_base = OTHER; note = "2'-O-Methyl nucleoside"
  modified_base 19: mod_base = OTHER; note = "2'-O-Methyl nucleoside"
  modified_base 21: mod_base = OTHER; note = "2'-O-Methyl nucleoside"
  modified_base 23: mod_base = OTHER; note = "inverted nucleotide"
  modified_base 1: mod_base = OTHER; note = "Chol-C6 modified nucleoside"
  modified_base 23: mod_base = OTHER; note = thymine
  source 1..23: mol_type = other RNA
tatacctctgcctaatcatctat

SEQ ID NO: 422 - RNA, 20 nt, synthetic construct
  modified_base 20: mod_base = OTHER; note = thymine
  misc_feature 1..20: note = HBV RNAi trigger sense strand
  modified_base 1: mod_base = OTHER; note = "2'-deoxy-3'-fluoro nucleoside"
  modified_base 3: mod_base = OTHER; note = "2'-deoxy-3'-fluoro nucleoside"
  modified_base 5: mod_base = OTHER; note = "2'-deoxy-3'-fluoro nucleoside"
  modified_base 7: mod_base = OTHER; note = "2'-deoxy-3'-fluoro nucleoside"
  modified_base 9: mod_base = OTHER; note = "2'-deoxy-3'-fluoro nucleoside"
  modified_base 11: mod_base = OTHER; note = "2'-deoxy-3'-fluoro nucleoside"
  modified_base 13: mod_base = OTHER; note = "2'-deoxy-3'-fluoro nucleoside"
  modified_base 15: mod_base = OTHER; note = "2'-deoxy-3'-fluoro nucleoside"
  modified_base 17: mod_base = OTHER; note = "2'-deoxy-3'-fluoro nucleoside"
  modified_base 19: mod_base = OTHER; note = "2'-deoxy-3'-fluoro nucleoside"
  modified_base 2: mod_base = OTHER; note = "2'-O-Methyl nucleoside"
  modified_base 4: mod_base = OTHER; note = "2'-O-Methyl nucleoside"
  modified_base 6: mod_base = OTHER; note = "2'-O-Methyl nucleoside"
  modified_base 8: mod_base = OTHER; note = "2'-O-Methyl nucleoside"
  modified_base 10: mod_base = OTHER; note = "2'-O-Methyl nucleoside"
  modified_base 12: mod_base = OTHER; note = "2'-O-Methyl nucleoside"
  modified_base 14: mod_base = OTHER; note = "2'-O-Methyl nucleoside"
  modified_base 16: mod_base = OTHER; note = "2'-O-Methyl nucleoside"
  modified_base 18: mod_base = OTHER; note = "2'-O-Methyl nucleoside"
  modified_base 20: mod_base = OTHER; note = "inverted nucleotide"
  modified_base 1: mod_base = OTHER; note = "NH2-C6 modified nucleoside"
  modified_base 20: mod_base = OTHER; note = thymine
  source 1..20: mol_type = other RNA
gtgtaggcataaattggtat

SEQ ID NO: 423 - RNA, 20 nt, synthetic construct
  modified_base 20: mod_base = OTHER; note = thymine
  misc_feature 1..20: note = HBV RNAi trigger sense strand
  modified_base 1: mod_base = OTHER; note = "2'-deoxy-3'-fluoro nucleoside"
  modified_base 3: mod_base = OTHER; note = "2'-deoxy-3'-fluoro nucleoside"
  modified_base 5: mod_base = OTHER; note = "2'-deoxy-3'-fluoro nucleoside"
  modified_base 7: mod_base = OTHER; note = "2'-deoxy-3'-fluoro nucleoside"
  modified_base 9: mod_base = OTHER; note = "2'-deoxy-3'-fluoro nucleoside"
  modified_base 11: mod_base = OTHER; note = "2'-deoxy-3'-fluoro nucleoside"
  modified_base 13: mod_base = OTHER; note = "2'-deoxy-3'-fluoro nucleoside"
  modified_base 15: mod_base = OTHER; note = "2'-deoxy-3'-fluoro nucleoside"
  modified_base 17: mod_base = OTHER; note = "2'-deoxy-3'-fluoro nucleoside"
  modified_base 19: mod_base = OTHER; note = "2'-deoxy-3'-fluoro nucleoside"
  modified_base 2: mod_base = OTHER; note = "2'-O-Methyl nucleoside"
  modified_base 4: mod_base = OTHER; note = "2'-O-Methyl nucleoside"
  modified_base 6: mod_base = OTHER; note = "2'-O-Methyl nucleoside"
  modified_base 8: mod_base = OTHER; note = "2'-O-Methyl nucleoside"
  modified_base 10: mod_base = OTHER; note = "2'-O-Methyl nucleoside"
  modified_base 12: mod_base = OTHER; note = "2'-O-Methyl nucleoside"
  modified_base 14: mod_base = OTHER; note = "2'-O-Methyl nucleoside"
  modified_base 16: mod_base = OTHER; note = "2'-O-Methyl nucleoside"
  modified_base 18: mod_base = OTHER; note = "2'-O-Methyl nucleoside"
  modified_base 20: mod_base = OTHER; note = "inverted nucleotide"
  modified_base 1: mod_base = OTHER; note = "NH2-C6 modified nucleoside"
  modified_base 20: mod_base = OTHER; note = thymine
  source 1..20: mol_type = other RNA
ccctctgcctaatcatctat

SEQ ID NO: 424 - RNA, 20 nt, synthetic construct
  modified_base 20: mod_base = OTHER; note = thymine
  misc_feature 1..20: note = HBV RNAi trigger sense strand
  modified_base 1: mod_base = OTHER; note = "2'-deoxy-3'-fluoro nucleoside"
  modified_base 3: mod_base = OTHER; note = "2'-deoxy-3'-fluoro nucleoside"
  modified_base 5: mod_base = OTHER; note = "2'-deoxy-3'-fluoro nucleoside"
  modified_base 7: mod_base = OTHER; note = "2'-deoxy-3'-fluoro nucleoside"
  modified_base 9: mod_base = OTHER; note = "2'-deoxy-3'-fluoro nucleoside"
  modified_base 11: mod_base = OTHER; note = "2'-deoxy-3'-fluoro nucleoside"
  modified_base 13: mod_base = OTHER; note = "2'-deoxy-3'-fluoro nucleoside"
  modified_base 15: mod_base = OTHER; note = "2'-deoxy-3'-fluoro nucleoside"
  modified_base 17: mod_base = OTHER; note = "2'-deoxy-3'-fluoro nucleoside"
  modified_base 19: mod_base = OTHER; note = "2'-deoxy-3'-fluoro nucleoside"
  modified_base 2: mod_base = OTHER; note = "2'-O-Methyl nucleoside"
  modified_base 4: mod_base = OTHER; note = "2'-O-Methyl nucleoside"
  modified_base 6: mod_base = OTHER; note = "2'-O-Methyl nucleoside"
  modified_base 8: mod_base = OTHER; note = "2'-O-Methyl nucleoside"
  modified_base 10: mod_base = OTHER; note = "2'-O-Methyl nucleoside"
  modified_base 12: mod_base = OTHER; note = "2'-O-Methyl nucleoside"
  modified_base 14: mod_base = OTHER; note = "2'-O-Methyl nucleoside"
  modified_base 16: mod_base = OTHER; note = "2'-O-Methyl nucleoside"
  modified_base 18: mod_base = OTHER; note = "2'-O-Methyl nucleoside"
  modified_base 20: mod_base = OTHER; note = "inverted nucleotide"
  modified_base 1: mod_base = OTHER; note = "NH2-C6 modified nucleoside"
  modified_base 20: mod_base = OTHER; note = thymine
  source 1..20: mol_type = other RNA
tttactagtgccatttgtat

SEQ ID NO: 425 - RNA, 23 nt, synthetic construct
  modified_base 23: mod_base = OTHER; note = thymine
  misc_feature 1..23: note = HBV RNAi trigger sense strand
  modified_base 2: mod_base = OTHER; note = "2'-hydroxy nucleoside"
  modified_base 4: mod_base = OTHER; note = "2'-deoxy-3'-fluoro nucleoside"
  modified_base 6: mod_base = OTHER; note = "2'-deoxy-3'-fluoro nucleoside"
  modified_base 10: mod_base = OTHER; note = "2'-deoxy-3'-fluoro nucleoside"
  modified_base 12: mod_base = OTHER; note = "2'-deoxy-3'-fluoro nucleoside"
  modified_base 14: mod_base = OTHER; note = "2'-deoxy-3'-fluoro nucleoside"
  modified_base 16: mod_base = OTHER; note = "2'-deoxy-3'-fluoro nucleoside"
  modified_base 18: mod_base = OTHER; note = "2'-deoxy-3'-fluoro nucleoside"
  modified_base 20: mod_base = OTHER; note = "2'-deoxy-3'-fluoro nucleoside"
  modified_base 22: mod_base = OTHER; note = "2'-deoxy-3'-fluoro nucleoside"
  modified_base 1: mod_base = OTHER; note = "2'-O-Methyl nucleoside"
  modified_base 3: mod_base = OTHER; note = "2'-O-Methyl nucleoside"
  modified_base 5: mod_base = OTHER; note = "2'-O-Methyl nucleoside"
  modified_base 7..9: mod_base = OTHER; note = "2'-O-Methyl nucleoside"
  modified_base 11: mod_base = OTHER; note = "2'-O-Methyl nucleoside"
  modified_base 13: mod_base = OTHER; note = "2'-O-Methyl nucleoside"
  modified_base 15: mod_base = OTHER; note = "2'-O-Methyl nucleoside"
  modified_base 17: mod_base = OTHER; note = "2'-O-Methyl nucleoside"
  modified_base 19: mod_base = OTHER; note = "2'-O-Methyl nucleoside"
  modified_base 21: mod_base = OTHER; note = "2'-O-Methyl nucleoside"
  modified_base 23: mod_base = OTHER; note = "inverted nucleotide"
  modified_base 1: mod_base = OTHER; note = "NH2-C6 modified nucleoside"
  modified_base 23: mod_base = OTHER; note = thymine
  source 1..23: mol_type = other RNA
tatctgtaggcataaattggtat

SEQ ID NO: 426 - RNA, 23 nt, synthetic construct
  modified_base 23: mod_base = OTHER; note = thymine
  misc_feature 1..23: note = HBV RNAi trigger sense strand
  modified_base 2: mod_base = OTHER; note = "2'-hydroxy nucleoside"
  modified_base 4: mod_base = OTHER; note = "2'-deoxy-3'-fluoro nucleoside"
  modified_base 6: mod_base = OTHER; note = "2'-deoxy-3'-fluoro nucleoside"
  modified_base 10: mod_base = OTHER; note = "2'-deoxy-3'-fluoro nucleoside"
  modified_base 12: mod_base = OTHER; note = "2'-deoxy-3'-fluoro nucleoside"
  modified_base 14: mod_base = OTHER; note = "2'-deoxy-3'-fluoro nucleoside"
  modified_base 16: mod_base = OTHER; note = "2'-deoxy-3'-fluoro nucleoside"
  modified_base 18: mod_base = OTHER; note = "2'-deoxy-3'-fluoro nucleoside"
  modified_base 20: mod_base = OTHER; note = "2'-deoxy-3'-fluoro nucleoside"
  modified_base 22: mod_base = OTHER; note = "2'-deoxy-3'-fluoro nucleoside"
  modified_base 1: mod_base = OTHER; note = "2'-O-Methyl nucleoside"
  modified_base 3: mod_base = OTHER; note = "2'-O-Methyl nucleoside"
  modified_base 5: mod_base = OTHER; note = "2'-O-Methyl nucleoside"
  modified_base 7..9: mod_base = OTHER; note = "2'-O-Methyl nucleoside"
  modified_base 11: mod_base = OTHER; note = "2'-O-Methyl nucleoside"
  modified_base 13: mod_base = OTHER; note = "2'-O-Methyl nucleoside"
  modified_base 15: mod_base = OTHER; note = "2'-O-Methyl nucleoside"
  modified_base 17: mod_base = OTHER; note = "2'-O-Methyl nucleoside"
  modified_base 19: mod_base = OTHER; note = "2'-O-Methyl nucleoside"
  modified_base 21: mod_base = OTHER; note = "2'-O-Methyl nucleoside"
  modified_base 23: mod_base = OTHER; note = "inverted nucleotide"
  modified_base 1: mod_base = OTHER; note = "NH2-C6 modified nucleoside"
  modified_base 23: mod_base = OTHER; note = thymine
  source 1..23: mol_type = other RNA
tatacctctgcctaatcatctat

SEQ ID NO: 427 - RNA, 23 nt, synthetic construct
  modified_base 23: mod_base = OTHER; note = thymine
  misc_feature 1..23: note = HBV RNAi trigger sense strand
  modified_base 2: mod_base = OTHER; note = "2'-hydroxy nucleoside"
  modified_base 4: mod_base = OTHER; note = "2'-deoxy-3'-fluoro nucleoside"
  modified_base 6: mod_base = OTHER; note = "2'-deoxy-3'-fluoro nucleoside"
  modified_base 8: mod_base = OTHER; note = "2'-deoxy-3'-fluoro nucleoside"
  modified_base 10: mod_base = OTHER; note = "2'-deoxy-3'-fluoro nucleoside"
  modified_base 12: mod_base = OTHER; note = "2'-deoxy-3'-fluoro nucleoside"
  modified_base 14: mod_base = OTHER; note = "2'-deoxy-3'-fluoro nucleoside"
  modified_base 16: mod_base = OTHER; note = "2'-deoxy-3'-fluoro nucleoside"
  modified_base 18: mod_base = OTHER; note = "2'-deoxy-3'-fluoro nucleoside"
  modified_base 20: mod_base = OTHER; note = "2'-deoxy-3'-fluoro nucleoside"
  modified_base 22: mod_base = OTHER; note = "2'-deoxy-3'-fluoro nucleoside"
  modified_base 1: mod_base = OTHER; note = "2'-O-Methyl nucleoside"
  modified_base 3: mod_base = OTHER; note = "2'-O-Methyl nucleoside"
  modified_base 5: mod_base = OTHER; note = "2'-O-Methyl nucleoside"
  modified_base 7: mod_base = OTHER; note = "2'-O-Methyl nucleoside"
  modified_base 9: mod_base = OTHER; note = "2'-O-Methyl nucleoside"
  modified_base 11: mod_base = OTHER; note = "2'-O-Methyl nucleoside"
  modified_base 13: mod_base = OTHER; note = "2'-O-Methyl nucleoside"
  modified_base 15: mod_base = OTHER; note = "2'-O-Methyl nucleoside"
  modified_base 17: mod_base = OTHER; note = "2'-O-Methyl nucleoside"
  modified_base 19: mod_base = OTHER; note = "2'-O-Methyl nucleoside"
  modified_base 21: mod_base = OTHER; note = "2'-O-Methyl nucleoside"
  modified_base 23: mod_base = OTHER; note = "inverted nucleotide"
  modified_base 1: mod_base = OTHER; note = "NH2-C6 modified nucleoside"
  modified_base 23: mod_base = OTHER; note = thymine
  source 1..23: mol_type = other RNA
tatctgtaggcataaattggtat

SEQ ID NO: 428 - RNA, 23 nt, synthetic construct
  modified_base 23: mod_base = OTHER; note = thymine
  misc_feature 1..23: note = HBV RNAi trigger sense strand
  modified_base 2: mod_base = OTHER; note = "2'-hydroxy nucleoside"
  modified_base 4: mod_base = OTHER; note = "2'-deoxy-3'-fluoro nucleoside"
  modified_base 6: mod_base = OTHER; note = "2'-deoxy-3'-fluoro nucleoside"
  modified_base 8: mod_base = OTHER; note = "2'-deoxy-3'-fluoro nucleoside"
  modified_base 10: mod_base = OTHER; note = "2'-deoxy-3'-fluoro nucleoside"
  modified_base 12: mod_base = OTHER; note = "2'-deoxy-3'-fluoro nucleoside"
  modified_base 14: mod_base = OTHER; note = "2'-deoxy-3'-fluoro nucleoside"
  modified_base 16: mod_base = OTHER; note = "2'-deoxy-3'-fluoro nucleoside"
  modified_base 18: mod_base = OTHER; note = "2'-deoxy-3'-fluoro nucleoside"
  modified_base 20: mod_base = OTHER; note = "2'-deoxy-3'-fluoro nucleoside"
  modified_base 22: mod_base = OTHER; note = "2'-deoxy-3'-fluoro nucleoside"
  modified_base 1: mod_base = OTHER; note = "2'-O-Methyl nucleoside"
  modified_base 3: mod_base = OTHER; note = "2'-O-Methyl nucleoside"
  modified_base 5: mod_base = OTHER; note = "2'-O-Methyl nucleoside"
  modified_base 7: mod_base = OTHER; note = "2'-O-Methyl nucleoside"
  modified_base 9: mod_base = OTHER; note = "2'-O-Methyl nucleoside"
  modified_base 11: mod_base = OTHER; note = "2'-O-Methyl nucleoside"
  modified_base 13: mod_base = OTHER; note = "2'-O-Methyl nucleoside"
  modified_base 15: mod_base = OTHER; note = "2'-O-Methyl nucleoside"
  modified_base 17: mod_base = OTHER; note = "2'-O-Methyl nucleoside"
  modified_base 19: mod_base = OTHER; note = "2'-O-Methyl nucleoside"
  modified_base 21: mod_base = OTHER; note = "2'-O-Methyl nucleoside"
  modified_base 23: mod_base = OTHER; note = "inverted nucleotide"
  modified_base 1: mod_base = OTHER; note = "NH2-C6 modified nucleoside"
  modified_base 23: mod_base = OTHER; note = thymine
  source 1..23: mol_type = other RNA
tatacctctgcctaatcatctat

SEQ ID NO: 429 - RNA, 20 nt, synthetic construct
  modified_base 20: mod_base = OTHER; note = thymine
  misc_feature 1..20: note = HBV RNAi trigger sense strand
  modified_base 1: mod_base = OTHER; note = "2'-deoxy-3'-fluoro nucleoside"
  modified_base 3: mod_base = OTHER; note = "2'-deoxy-3'-fluoro nucleoside"
  modified_base 7: mod_base = OTHER; note = "2'-deoxy-3'-fluoro nucleoside"
  modified_base 9: mod_base = OTHER; note = "2'-deoxy-3'-fluoro nucleoside"
  modified_base 11: mod_base = OTHER; note = "2'-deoxy-3'-fluoro nucleoside"
  modified_base 13: mod_base = OTHER; note = "2'-deoxy-3'-fluoro nucleoside"
  modified_base 15: mod_base = OTHER; note = "2'-deoxy-3'-fluoro nucleoside"
  modified_base 17: mod_base = OTHER; note = "2'-deoxy-3'-fluoro nucleoside"
  modified_base 19: mod_base = OTHER; note = "2'-deoxy-3'-fluoro nucleoside"
  modified_base 2: mod_base = OTHER; note = "2'-O-Methyl nucleoside"
  modified_base 4..6: mod_base = OTHER; note = "2'-O-Methyl nucleoside"
  modified_base 8: mod_base = OTHER; note = "2'-O-Methyl nucleoside"
  modified_base 10: mod_base = OTHER; note = "2'-O-Methyl nucleoside"
  modified_base 12: mod_base = OTHER; note = "2'-O-Methyl nucleoside"
  modified_base 14: mod_base = OTHER; note = "2'-O-Methyl nucleoside"
  modified_base 16: mod_base = OTHER; note = "2'-O-Methyl nucleoside"
  modified_base 18: mod_base = OTHER; note = "2'-O-Methyl nucleoside"
  modified_base 20: mod_base = OTHER; note = "inverted nucleotide"
  modified_base 1: mod_base = OTHER; note = "NH2-C6 modified nucleoside"
  modified_base 20: mod_base = OTHER; note = thymine
  source 1..20: mol_type = other RNA
gtgtaggcataaattggtat

SEQ ID NO: 430 - RNA, 20 nt, synthetic construct
  modified_base 20: mod_base = OTHER; note = thymine
  misc_feature 1..20: note = HBV RNAi trigger sense strand
  modified_base 1: mod_base = OTHER; note = "2'-deoxy-3'-fluoro nucleoside"
  modified_base 3: mod_base = OTHER; note = "2'-deoxy-3'-fluoro nucleoside"
  modified_base 7: mod_base = OTHER; note = "2'-deoxy-3'-fluoro nucleoside"
  modified_base 9: mod_base = OTHER; note = "2'-deoxy-3'-fluoro nucleoside"
  modified_base 11: mod_base = OTHER; note = "2'-deoxy-3'-fluoro nucleoside"
  modified_base 13: mod_base = OTHER; note = "2'-deoxy-3'-fluoro nucleoside"
  modified_base 15: mod_base = OTHER; note = "2'-deoxy-3'-fluoro nucleoside"
  modified_base 17: mod_base = OTHER; note = "2'-deoxy-3'-fluoro nucleoside"
  modified_base 19: mod_base = OTHER; note = "2'-deoxy-3'-fluoro nucleoside"
  modified_base 2: mod_base = OTHER; note = "2'-O-Methyl nucleoside"
  modified_base 4..6: mod_base = OTHER; note = "2'-O-Methyl nucleoside"
  modified_base 8: mod_base = OTHER; note = "2'-O-Methyl nucleoside"
  modified_base 10: mod_base = OTHER; note = "2'-O-Methyl nucleoside"
  modified_base 12: mod_base = OTHER; note = "2'-O-Methyl nucleoside"
  modified_base 14: mod_base = OTHER; note = "2'-O-Methyl nucleoside"
  modified_base 16: mod_base = OTHER; note = "2'-O-Methyl nucleoside"
  modified_base 18: mod_base = OTHER; note = "2'-O-Methyl nucleoside"
  modified_base 20: mod_base = OTHER; note = "inverted nucleotide"
  modified_base 1: mod_base = OTHER; note = "NH2-C6 modified nucleoside"
  modified_base 20: mod_base = OTHER; note = thymine
  source 1..20: mol_type = other RNA
ccctctgcctaatcatctat

SEQ ID NO: 431 - RNA, 20 nt, synthetic construct
  modified_base 20: mod_base = OTHER; note = thymine
  misc_feature 1..20: note = HBV RNAi trigger sense strand
  modified_base 1: mod_base = OTHER; note = "2'-deoxy-3'-fluoro nucleoside"
  modified_base 3: mod_base = OTHER; note = "2'-deoxy-3'-fluoro nucleoside"
  modified_base 5: mod_base = OTHER; note = "2'-deoxy-3'-fluoro nucleoside"
  modified_base 9: mod_base = OTHER; note = "2'-deoxy-3'-fluoro nucleoside"
  modified_base 11: mod_base = OTHER; note = "2'-deoxy-3'-fluoro nucleoside"
  modified_base 13: mod_base = OTHER; note = "2'-deoxy-3'-fluoro nucleoside"
  modified_base 15: mod_base = OTHER; note = "2'-deoxy-3'-fluoro nucleoside"
  modified_base 17: mod_base = OTHER; note = "2'-deoxy-3'-fluoro nucleoside"
  modified_base 19: mod_base = OTHER; note = "2'-deoxy-3'-fluoro nucleoside"
  modified_base 2: mod_base = OTHER; note = "2'-O-Methyl nucleoside"
  modified_base 4: mod_base = OTHER; note = "2'-O-Methyl nucleoside"
  modified_base 6: mod_base = OTHER; note = "2'-O-Methyl nucleoside"
  modified_base 7..8: mod_base = OTHER; note = "2'-O-Methyl nucleoside"
  modified_base 10: mod_base = OTHER; note = "2'-O-Methyl nucleoside"
  modified_base 12: mod_base = OTHER; note = "2'-O-Methyl nucleoside"
  modified_base 14: mod_base = OTHER; note = "2'-O-Methyl nucleoside"
  modified_base 16: mod_base = OTHER; note = "2'-O-Methyl nucleoside"
  modified_base 18: mod_base = OTHER; note = "2'-O-Methyl nucleoside"
  modified_base 20: mod_base = OTHER; note = "inverted nucleotide"
  modified_base 1: mod_base = OTHER; note = "NH2-C6 modified nucleoside"
  modified_base 20: mod_base = OTHER; note = thymine
  source 1..20: mol_type = other RNA
ccctctgcctaatcatctat

SEQ ID NO: 432 - RNA, 20 nt, synthetic construct
  modified_base 20: mod_base = OTHER; note = thymine
  misc_feature 1..20: note = HBV RNAi trigger sense strand
  modified_base 1: mod_base = OTHER; note = "2'-deoxy-3'-fluoro nucleoside"
  modified_base 3: mod_base = OTHER; note = "2'-deoxy-3'-fluoro nucleoside"
  modified_base 5: mod_base = OTHER; note = "2'-deoxy-3'-fluoro nucleoside"
  modified_base 7: mod_base = OTHER; note = "2'-deoxy-3'-fluoro nucleoside"
  modified_base 11: mod_base = OTHER; note = "2'-deoxy-3'-fluoro nucleoside"
  modified_base 13: mod_base = OTHER; note = "2'-deoxy-3'-fluoro nucleoside"
  modified_base 15: mod_base = OTHER; note = "2'-deoxy-3'-fluoro nucleoside"
  modified_base 17: mod_base = OTHER; note = "2'-deoxy-3'-fluoro nucleoside"
  modified_base 19: mod_base = OTHER; note = "2'-deoxy-3'-fluoro nucleoside"
  modified_base 2: mod_base = OTHER; note = "2'-O-Methyl nucleoside"
  modified_base 4: mod_base = OTHER; note = "2'-O-Methyl nucleoside"
  modified_base 6: mod_base = OTHER; note = "2'-O-Methyl nucleoside"
  modified_base 8..10: mod_base = OTHER; note = "2'-O-Methyl nucleoside"
  modified_base 12: mod_base = OTHER; note = "2'-O-Methyl nucleoside"
  modified_base 14: mod_base = OTHER; note = "2'-O-Methyl nucleoside"
  modified_base 16: mod_base = OTHER; note = "2'-O-Methyl nucleoside"
  modified_base 18: mod_base = OTHER; note = "2'-O-Methyl nucleoside"
  modified_base 20: mod_base = OTHER; note = "inverted nucleotide"
  modified_base 1: mod_base = OTHER; note = "NH2-C6 modified nucleoside"
  modified_base 20: mod_base = OTHER; note = thymine
  source 1..20: mol_type = other RNA
ccctctgcctaatcatctat

SEQ ID NO: 433 - RNA, 20 nt, synthetic construct
  modified_base 20: mod_base = OTHER; note = thymine
  misc_feature 1..20: note = HBV RNAi trigger sense strand
  modified_base 1: mod_base = OTHER; note = "2'-deoxy-3'-fluoro nucleoside"
  modified_base 3: mod_base = OTHER; note = "2'-deoxy-3'-fluoro nucleoside"
  modified_base 5: mod_base = OTHER; note = "2'-deoxy-3'-fluoro nucleoside"
  modified_base 7: mod_base = OTHER; note = "2'-deoxy-3'-fluoro nucleoside"
  modified_base 9: mod_base = OTHER; note = "2'-deoxy-3'-fluoro nucleoside"
  modified_base 13: mod_base = OTHER; note = "2'-deoxy-3'-fluoro nucleoside"
  modified_base 15: mod_base = OTHER; note = "2'-deoxy-3'-fluoro nucleoside"
  modified_base 17: mod_base = OTHER; note = "2'-deoxy-3'-fluoro nucleoside"
  modified_base 19: mod_base = OTHER; note = "2'-deoxy-3'-fluoro nucleoside"
  modified_base 2: mod_base = OTHER; note = "2'-O-Methyl nucleoside"
  modified_base 4: mod_base = OTHER; note = "2'-O-Methyl nucleoside"
  modified_base 6: mod_base = OTHER; note = "2'-O-Methyl nucleoside"
  modified_base 8: mod_base = OTHER; note = "2'-O-Methyl nucleoside"
  modified_base 10: mod_base = OTHER; note = "2'-O-Methyl nucleoside"
  modified_base 11: mod_base = OTHER; note = "2'-O-Methyl nucleoside"
  modified_base 12: mod_base = OTHER; note = "2'-O-Methyl nucleoside"
  modified_base 14: mod_base = OTHER; note = "2'-O-Methyl nucleoside"
  modified_base 16: mod_base = OTHER; note = "2'-O-Methyl nucleoside"
  modified_base 18: mod_base = OTHER; note = "2'-O-Methyl nucleoside"
  modified_base 20: mod_base = OTHER; note = "inverted nucleotide"
  modified_base 20: mod_base = OTHER; note = "inverted nucleotide"
  modified_base 1: mod_base = OTHER; note = "NH2-C6 modified nucleoside"
  modified_base 20: mod_base = OTHER; note = thymine
  source 1..20: mol_type = other RNA
ccctctgcctaatcatctat

SEQ ID NO: 434 - RNA, 20 nt, synthetic construct
  modified_base 20: mod_base = OTHER; note = thymine
  misc_feature 1..20: note = HBV RNAi trigger sense strand
  modified_base 1: mod_base = OTHER; note = "2'-deoxy-3'-fluoro nucleoside"
  modified_base 3: mod_base = OTHER; note = "2'-deoxy-3'-fluoro nucleoside"
  modified_base 5: mod_base = OTHER; note = "2'-deoxy-3'-fluoro nucleoside"
  modified_base 7: mod_base = OTHER; note = "2'-deoxy-3'-fluoro nucleoside"
  modified_base 9: mod_base = OTHER; note = "2'-deoxy-3'-fluoro nucleoside"
  modified_base 11: mod_base = OTHER; note = "2'-deoxy-3'-fluoro nucleoside"
  modified_base 15: mod_base = OTHER; note = "2'-deoxy-3'-fluoro nucleoside"
  modified_base 17: mod_base = OTHER; note = "2'-deoxy-3'-fluoro nucleoside"
  modified_base 19: mod_base = OTHER; note = "2'-deoxy-3'-fluoro nucleoside"
  modified_base 2: mod_base = OTHER; note = "2'-O-Methyl nucleoside"
  modified_base 4: mod_base = OTHER; note = "2'-O-Methyl nucleoside"
  modified_base 6: mod_base = OTHER; note = "2'-O-Methyl nucleoside"
  modified_base 8: mod_base = OTHER; note = "2'-O-Methyl nucleoside"
  modified_base 10: mod_base = OTHER; note = "2'-O-Methyl nucleoside"
  modified_base 12..14: mod_base = OTHER; note = "2'-O-Methyl nucleoside"
  modified_base 16: mod_base = OTHER; note = "2'-O-Methyl nucleoside"
  modified_base 18: mod_base = OTHER; note = "2'-O-Methyl nucleoside"
  modified_base 20: mod_base = OTHER; note = "inverted nucleotide"
  modified_base 1: mod_base = OTHER; note = "NH2-C6 modified nucleoside"
  modified_base 20: mod_base = OTHER; note = thymine
  source 1..20: mol_type = other RNA
ccctctgcctaatcatctat

SEQ ID NO: 435 - RNA, 20 nt, synthetic construct
  modified_base 20: mod_base = OTHER; note = thymine
  misc_feature 1..20: note = HBV RNAi trigger sense strand
  modified_base 1: mod_base = OTHER; note = "2'-deoxy-3'-fluoro nucleoside"
  modified_base 3: mod_base = OTHER; note = "2'-deoxy-3'-fluoro nucleoside"
  modified_base 5..7: mod_base = OTHER; note = "2'-deoxy-3'-fluoro nucleoside"
  modified_base 9: mod_base = OTHER; note = "2'-deoxy-3'-fluoro nucleoside"
  modified_base 11: mod_base = OTHER; note = "2'-deoxy-3'-fluoro nucleoside"
  modified_base 13: mod_base = OTHER; note = "2'-deoxy-3'-fluoro nucleoside"
  modified_base 15: mod_base = OTHER; note = "2'-deoxy-3'-fluoro nucleoside"
  modified_base 17: mod_base = OTHER; note = "2'-deoxy-3'-fluoro nucleoside"
  modified_base 19: mod_base = OTHER; note = "2'-deoxy-3'-fluoro nucleoside"
  modified_base 2: mod_base = OTHER; note = "2'-O-Methyl nucleoside"
  modified_base 4: mod_base = OTHER; note = "2'-O-Methyl nucleoside"
  modified_base 8: mod_base = OTHER; note = "2'-O-Methyl nucleoside"
  modified_base 10: mod_base = OTHER; note = "2'-O-Methyl nucleoside"
  modified_base 12: mod_base = OTHER; note = "2'-O-Methyl nucleoside"
  modified_base 14: mod_base = OTHER; note = "2'-O-Methyl nucleoside"
  modified_base 16: mod_base = OTHER; note = "2'-O-Methyl nucleoside"
  modified_base 18: mod_base = OTHER; note = "2'-O-Methyl nucleoside"
  modified_base 20: mod_base = OTHER; note = "2'-O-Methyl nucleoside"
  modified_base 1: mod_base = OTHER; note = "NH2-C6 modified nucleoside"
  modified_base 20: mod_base = OTHER; note = thymine
  source 1..20: mol_type = other RNA
ccctctgcctaatcatctat

SEQ ID NO: 436 - RNA, 20 nt, synthetic construct
  modified_base 20: mod_base = OTHER; note = thymine
  misc_feature 1..20: note = HBV RNAi trigger sense strand
  modified_base 1: mod_base = OTHER; note = "2'-deoxy-3'-fluoro nucleoside"
  modified_base 3: mod_base = OTHER; note = "2'-deoxy-3'-fluoro nucleoside"
  modified_base 5: mod_base = OTHER; note = "2'-deoxy-3'-fluoro nucleoside"
  modified_base 7..9: mod_base = OTHER; note = "2'-deoxy-3'-fluoro nucleoside"
  modified_base 11: mod_base = OTHER; note = "2'-deoxy-3'-fluoro nucleoside"
  modified_base 13: mod_base = OTHER; note = "2'-deoxy-3'-fluoro nucleoside"
  modified_base 15: mod_base = OTHER; note = "2'-deoxy-3'-fluoro nucleoside"
  modified_base 17: mod_base = OTHER; note = "2'-deoxy-3'-fluoro nucleoside"
  modified_base 19: mod_base = OTHER; note = "2'-deoxy-3'-fluoro nucleoside"
  modified_base 2: mod_base = OTHER; note = "2'-O-Methyl nucleoside"
  modified_base 4: mod_base = OTHER; note = "2'-O-Methyl nucleoside"
  modified_base 6: mod_base = OTHER; note = "2'-O-Methyl nucleoside"
  modified_base 10: mod_base = OTHER; note = "2'-O-Methyl nucleoside"
  modified_base 12: mod_base = OTHER; note = "2'-O-Methyl nucleoside"
  modified_base 14: mod_base = OTHER; note = "2'-O-Methyl nucleoside"
  modified_base 16: mod_base = OTHER; note = "2'-O-Methyl nucleoside"
  modified_base 18: mod_base = OTHER; note = "2'-O-Methyl nucleoside"
  modified_base 20: mod_base = OTHER; note = "inverted nucleotide"
  modified_base 1: mod_base = OTHER; note = "NH2-C6 modified nucleoside"
  modified_base 20: mod_base = OTHER; note = thymine
  source 1..20: mol_type = other RNA
ccctctgcctaatcatctat

SEQ ID NO: 437 - RNA, 20 nt, synthetic construct
  modified_base 20: mod_base = OTHER; note = thymine
  misc_feature 1..20: note = HBV RNAi trigger sense strand
  modified_base 1: mod_base = OTHER; note = "2'-deoxy-3'-fluoro nucleoside"
  modified_base 3: mod_base = OTHER; note = "2'-deoxy-3'-fluoro nucleoside"
  modified_base 5: mod_base = OTHER; note = "2'-deoxy-3'-fluoro nucleoside"
  modified_base 7: mod_base = OTHER; note = "2'-deoxy-3'-fluoro nucleoside"
  modified_base 9..11: mod_base = OTHER; note = "2'-deoxy-3'-fluoro nucleoside"
  modified_base 13: mod_base = OTHER; note = "2'-deoxy-3'-fluoro nucleoside"
  modified_base 15: mod_base = OTHER; note = "2'-deoxy-3'-fluoro nucleoside"
  modified_base 17: mod_base = OTHER; note = "2'-deoxy-3'-fluoro nucleoside"
  modified_base 19: mod_base = OTHER; note = "2'-deoxy-3'-fluoro nucleoside"
  modified_base 2: mod_base = OTHER; note = "2'-O-Methyl nucleoside"
  modified_base 4: mod_base = OTHER; note = "2'-O-Methyl nucleoside"
  modified_base 6: mod_base = OTHER; note = "2'-O-Methyl nucleoside"
  modified_base 8: mod_base = OTHER; note = "2'-O-Methyl nucleoside"
  modified_base 12: mod_base = OTHER; note = "2'-O-Methyl nucleoside"
  modified_base 14: mod_base = OTHER; note = "2'-O-Methyl nucleoside"
  modified_base 16: mod_base = OTHER; note = "2'-O-Methyl nucleoside"
  modified_base 18: mod_base = OTHER; note = "2'-O-Methyl nucleoside"
  modified_base 20: mod_base = OTHER; note = "inverted nucleotide"
  modified_base 1: mod_base = OTHER; note = "NH2-C6 modified nucleoside"
  modified_base 20: mod_base = OTHER; note = thymine
  source 1..20: mol_type = other RNA
ccctctgcctaatcatctat

SEQ ID NO: 438 - RNA, 20 nt, synthetic construct
  modified_base 20: mod_base = OTHER; note = thymine
  misc_feature 1..20: note = HBV RNAi trigger sense strand
  modified_base 1: mod_base = OTHER; note = "2'-deoxy-3'-fluoro nucleoside"
  modified_base 3: mod_base = OTHER; note = "2'-deoxy-3'-fluoro nucleoside"
  modified_base 5: mod_base = OTHER; note = "2'-deoxy-3'-fluoro nucleoside"
  modified_base 7: mod_base = OTHER; note = "2'-deoxy-3'-fluoro nucleoside"
  modified_base 9: mod_base = OTHER; note = "2'-deoxy-3'-fluoro nucleoside"
  modified_base 11..13: mod_base = OTHER; note = "2'-deoxy-3'-fluoro nucleoside"
  modified_base 15: mod_base = OTHER; note = "2'-deoxy-3'-fluoro nucleoside"
  modified_base 17: mod_base = OTHER; note = "2'-deoxy-3'-fluoro nucleoside"
  modified_base 19: mod_base = OTHER; note = "2'-deoxy-3'-fluoro nucleoside"
  modified_base 2: mod_base = OTHER; note = "2'-O-Methyl nucleoside"
  modified_base 4: mod_base = OTHER; note = "2'-O-Methyl nucleoside"
  modified_base 6: mod_base = OTHER; note = "2'-O-Methyl nucleoside"
  modified_base 8: mod_base = OTHER; note = "2'-O-Methyl nucleoside"
  modified_base 10: mod_base = OTHER; note = "2'-O-Methyl nucleoside"
  modified_base 14: mod_base = OTHER; note = "2'-O-Methyl nucleoside"
  modified_base 16: mod_base = OTHER; note = "2'-O-Methyl nucleoside"
  modified_base 18: mod_base = OTHER; note = "2'-O-Methyl nucleoside"
  modified_base 20: mod_base = OTHER; note = "inverted nucleotide"
  modified_base 1: mod_base = OTHER; note = "NH2-C6 modified nucleoside"
  modified_base 20: mod_base = OTHER; note = thymine
  source 1..20: mol_type = other RNA
ccctctgcctaatcatctat

SEQ ID NO: 439 - RNA, 20 nt, synthetic construct
  modified_base 20: mod_base = OTHER; note = thymine
  misc_feature 1..20: note = HBV RNAi trigger sense strand
  modified_base 1: mod_base = OTHER; note = "2'-deoxy-3'-fluoro nucleoside"
  modified_base 3: mod_base = OTHER; note = "2'-deoxy-3'-fluoro nucleoside"
  modified_base 5: mod_base = OTHER; note = "2'-deoxy-3'-fluoro nucleoside"
  modified_base 7: mod_base = OTHER; note = "2'-deoxy-3'-fluoro nucleoside"
  modified_base 9: mod_base = OTHER; note = "2'-deoxy-3'-fluoro nucleoside"
  modified_base 11: mod_base = OTHER; note = "2'-deoxy-3'-fluoro nucleoside"
  modified_base 13..15: mod_base = OTHER; note = "2'-deoxy-3'-fluoro nucleoside"
  modified_base 17: mod_base = OTHER; note = "2'-deoxy-3'-fluoro nucleoside"
  modified_base 19: mod_base = OTHER; note = "2'-deoxy-3'-fluoro nucleoside"
  modified_base 2: mod_base = OTHER; note = "2'-O-Methyl nucleoside"
  modified_base 4: mod_base = OTHER; note = "2'-O-Methyl nucleoside"
  modified_base 6: mod_base = OTHER; note = "2'-O-Methyl nucleoside"
  modified_base 8: mod_base = OTHER; note = "2'-O-Methyl nucleoside"
  modified_base 10: mod_base = OTHER; note = "2'-O-Methyl nucleoside"
  modified_base 12: mod_base = OTHER; note = "2'-O-Methyl nucleoside"
  modified_base 16: mod_base = OTHER; note = "2'-O-Methyl nucleoside"
  modified_base 18: mod_base = OTHER; note = "2'-O-Methyl nucleoside"
  modified_base 20: mod_base = OTHER; note = "inverted nucleotide"
  modified_base 1: mod_base = OTHER; note = "NH2-C6 modified nucleoside"
  modified_base 20: mod_base = OTHER; note = thymine
  source 1..20: mol_type = other RNA
ccctctgcctaatcatctat

SEQ ID NO: 440 - RNA, 20 nt, synthetic construct
  modified_base 20: mod_base = OTHER; note = thymine
  misc_feature 1..20: note = HBV RNAi trigger sense strand
  modified_base 1: mod_base = OTHER; note = "2'-3' seco nucleoside"
  modified_base 3: mod_base = OTHER; note = "2'-deoxy-3'-fluoro nucleoside"
  modified_base 5: mod_base = OTHER; note = "2'-deoxy-3'-fluoro nucleoside"
  modified_base 7: mod_base = OTHER; note = "2'-deoxy-3'-fluoro nucleoside"
  modified_base 9: mod_base = OTHER; note = "2'-deoxy-3'-fluoro nucleoside"
  modified_base 11: mod_base = OTHER; note = "2'-deoxy-3'-fluoro nucleoside"
  modified_base 13: mod_base = OTHER; note = "2'-deoxy-3'-fluoro nucleoside"
  modified_base 15: mod_base = OTHER; note = "2'-deoxy-3'-fluoro nucleoside"
  modified_base 17: mod_base = OTHER; note = "2'-deoxy-3'-fluoro nucleoside"
  modified_base 19: mod_base = OTHER; note = "2'-deoxy-3'-fluoro nucleoside"
  modified_base 2: mod_base = OTHER; note = "2'-O-Methyl nucleoside"
  modified_base 4: mod_base = OTHER; note = "2'-O-Methyl nucleoside"
  modified_base 6: mod_base = OTHER; note = "2'-O-Methyl nucleoside"
  modified_base 8: mod_base = OTHER; note = "2'-O-Methyl nucleoside"
  modified_base 10: mod_base = OTHER; note = "2'-O-Methyl nucleoside"
  modified_base 12: mod_base = OTHER; note = "2'-O-Methyl nucleoside"
  modified_base 14: mod_base = OTHER; note = "2'-O-Methyl nucleoside"
  modified_base 16: mod_base = OTHER; note = "2'-O-Methyl nucleoside"
  modified_base 18: mod_base = OTHER; note = "2'-O-Methyl nucleoside"
  modified_base 20: mod_base = OTHER; note = "inverted nucleotide"
  modified_base 1: mod_base = OTHER; note = "NH2-C6 modified nucleoside"
  modified_base 20: mod_base = OTHER; note = thymine
  source 1..20: mol_type = other RNA
ctgtaggcataaattggtat

SEQ ID NO: 441 - RNA, 20 nt, synthetic construct
  modified_base 20: mod_base = OTHER; note = thymine
  misc_feature 1..20: note = HBV RNAi trigger sense strand
  modified_base 2: mod_base = OTHER; note = "2'-3' seco nucleoside"
  modified_base 1: mod_base = OTHER; note = "2'-deoxy-3'-fluoro nucleoside"
  modified_base 3: mod_base = OTHER; note = "2'-deoxy-3'-fluoro nucleoside"
  modified_base 5: mod_base = OTHER; note = "2'-deoxy-3'-fluoro nucleoside"
  modified_base 7: mod_base = OTHER; note = "2'-deoxy-3'-fluoro nucleoside"
  modified_base 9: mod_base = OTHER; note = "2'-deoxy-3'-fluoro nucleoside"
  modified_base 11: mod_base = OTHER; note = "2'-deoxy-3'-fluoro nucleoside"
  modified_base 13: mod_base = OTHER; note = "2'-deoxy-3'-fluoro nucleoside"
  modified_base 15: mod_base = OTHER; note = "2'-deoxy-3'-fluoro nucleoside"
  modified_base 17: mod_base = OTHER; note = "2'-deoxy-3'-fluoro nucleoside"
  modified_base 19: mod_base = OTHER; note = "2'-deoxy-3'-fluoro nucleoside"
  modified_base 4: mod_base = OTHER; note = "2'-O-Methyl nucleoside"
  modified_base 6: mod_base = OTHER; note = "2'-O-Methyl nucleoside"
  modified_base 8: mod_base = OTHER; note = "2'-O-Methyl nucleoside"
  modified_base 10: mod_base = OTHER; note = "2'-O-Methyl nucleoside"
  modified_base 12: mod_base = OTHER; note = "2'-O-Methyl nucleoside"
  modified_base 14: mod_base = OTHER; note = "2'-O-Methyl nucleoside"
  modified_base 16: mod_base = OTHER; note = "2'-O-Methyl nucleoside"
  modified_base 18: mod_base = OTHER; note = "2'-O-Methyl nucleoside"
  modified_base 20: mod_base = OTHER; note = "inverted nucleotide"
  modified_base 1: mod_base = OTHER; note = "NH2-C6 modified nucleoside"
  modified_base 20: mod_base = OTHER; note = thymine
  source 1..20: mol_type = other RNA
gtgtaggcataaattggtat

SEQ ID NO: 442 - RNA, 20 nt, synthetic construct
  modified_base 20: mod_base = OTHER; note = thymine
  misc_feature 1..20: note = HBV RNAi trigger sense strand
  modified_base 1: mod_base = OTHER; note = "2'-3' seco nucleoside"
  modified_base 3: mod_base = OTHER; note = "2'-deoxy-3'-fluoro nucleoside"
  modified_base 5: mod_base = OTHER; note = "2'-deoxy-3'-fluoro nucleoside"
  modified_base 7: mod_base = OTHER; note = "2'-deoxy-3'-fluoro nucleoside"
  modified_base 9: mod_base = OTHER; note = "2'-deoxy-3'-fluoro nucleoside"
  modified_base 11: mod_base = OTHER; note = "2'-deoxy-3'-fluoro nucleoside"
  modified_base 13: mod_base = OTHER; note = "2'-deoxy-3'-fluoro nucleoside"
  modified_base 15: mod_base = OTHER; note = "2'-deoxy-3'-fluoro nucleoside"
  modified_base 17: mod_base = OTHER; note = "2'-deoxy-3'-fluoro nucleoside"
  modified_base 19: mod_base = OTHER; note = "2'-deoxy-3'-fluoro nucleoside"
  modified_base 2: mod_base = OTHER; note = "2'-O-Methyl nucleoside"
  modified_base 4: mod_base = OTHER; note = "2'-O-Methyl nucleoside"
  modified_base 6: mod_base = OTHER; note = "2'-O-Methyl nucleoside"
  modified_base 8: mod_base = OTHER; note = "2'-O-Methyl nucleoside"
  modified_base 10: mod_base = OTHER; note = "2'-O-Methyl nucleoside"
  modified_base 12: mod_base = OTHER; note = "2'-O-Methyl nucleoside"
  modified_base 14: mod_base = OTHER; note = "2'-O-Methyl nucleoside"
  modified_base 16: mod_base = OTHER; note = "2'-O-Methyl nucleoside"
  modified_base 18: mod_base = OTHER; note = "2'-O-Methyl nucleoside"
  modified_base 20: mod_base = OTHER; note = "inverted nucleotide"
  modified_base 1: mod_base = OTHER; note = "NH2-C6 modified nucleoside"
  modified_base 20: mod_base = OTHER; note = thymine
  source 1..20: mol_type = other RNA
acctctgcctaatcatctat

SEQ ID NO: 443 - RNA, 20 nt, synthetic construct
  modified_base 20: mod_base = OTHER; note = thymine
  misc_feature 1..20: note = HBV RNAi trigger sense strand
  modified_base 2: mod_base = OTHER; note = "2'-3' seco nucleoside"
  modified_base 1: mod_base = OTHER; note = "2'-deoxy-3'-fluoro nucleoside"
  modified_base 3: mod_base = OTHER; note = "2'-deoxy-3'-fluoro nucleoside"
  modified_base 5: mod_base = OTHER; note = "2'-deoxy-3'-fluoro nucleoside"
  modified_base 7: mod_base = OTHER; note = "2'-deoxy-3'-fluoro nucleoside"
  modified_base 9: mod_base = OTHER; note = "2'-deoxy-3'-fluoro nucleoside"
  modified_base 11: mod_base = OTHER; note = "2'-deoxy-3'-fluoro nucleoside"
  modified_base 13: mod_base = OTHER; note = "2'-deoxy-3'-fluoro nucleoside"
  modified_base 15: mod_base = OTHER; note = "2'-deoxy-3'-fluoro nucleoside"
  modified_base 17: mod_base = OTHER; note = "2'-deoxy-3'-fluoro nucleoside"
  modified_base 19: mod_base = OTHER; note = "2'-deoxy-3'-fluoro nucleoside"
  modified_base 4: mod_base = OTHER; note = "2'-O-Methyl nucleoside"
  modified_base 6: mod_base = OTHER; note = "2'-O-Methyl nucleoside"
  modified_base 8: mod_base = OTHER; note = "2'-O-Methyl nucleoside"
  modified_base 10: mod_base = OTHER; note = "2'-O-Methyl nucleoside"
  modified_base 12: mod_base = OTHER; note = "2'-O-Methyl nucleoside"
  modified_base 14: mod_base = OTHER; note = "2'-O-Methyl nucleoside"
  modified_base 16: mod_base = OTHER; note = "2'-O-Methyl nucleoside"
  modified_base 18: mod_base = OTHER; note = "2'-O-Methyl nucleoside"
  modified_base 20: mod_base = OTHER; note = "inverted nucleotide"
  modified_base 1: mod_base = OTHER; note = "NH2-C6 modified nucleoside"
  modified_base 20: mod_base = OTHER; note = thymine
  source 1..20: mol_type = other RNA
ccctctgcctaatcatctat

SEQ ID NO: 444 - RNA, 20 nt, synthetic construct
  modified_base 20: mod_base = OTHER; note = thymine
  misc_feature 1..20: note = HBV RNAi trigger sense strand
  modified_base 1: mod_base = OTHER; note = "2'-deoxy-3'-fluoro nucleoside"
  modified_base 3: mod_base = OTHER; note = "2'-deoxy-3'-fluoro nucleoside"
  modified_base 5: mod_base = OTHER; note = "2'-deoxy-3'-fluoro nucleoside"
  modified_base 7: mod_base = OTHER; note = "2'-deoxy-3'-fluoro nucleoside"
  modified_base 9: mod_base = OTHER; note = "2'-deoxy-3'-fluoro nucleoside"
  modified_base 11: mod_base = OTHER; note = "2'-deoxy-3'-fluoro nucleoside"
  modified_base 13: mod_base = OTHER; note = "2'-deoxy-3'-fluoro nucleoside"
  modified_base 15: mod_base = OTHER; note = "2'-deoxy-3'-fluoro nucleoside"
  modified_base 17: mod_base = OTHER; note = "2'-deoxy-3'-fluoro nucleoside"
  modified_base 19: mod_base = OTHER; note = "2'-deoxy-3'-fluoro nucleoside"
  modified_base 2: mod_base = OTHER; note = "2'-O-Methyl nucleoside"
  modified_base 4: mod_base = OTHER; note = "2'-O-Methyl nucleoside"
  modified_base 6: mod_base = OTHER; note = "2'-O-Methyl nucleoside"
  modified_base 8: mod_base = OTHER; note = "2'-O-Methyl nucleoside"
  modified_base 10: mod_base = OTHER; note = "2'-O-Methyl nucleoside"
  modified_base 12: mod_base = OTHER; note = "2'-O-Methyl nucleoside"
  modified_base 14: mod_base = OTHER; note = "2'-O-Methyl nucleoside"
  modified_base 16: mod_base = OTHER; note = "2'-O-Methyl nucleoside"
  modified_base 18: mod_base = OTHER; note = "2'-O-Methyl nucleoside"
  modified_base 20: mod_base = OTHER; note = "inverted nucleotide"
  modified_base 20: mod_base = OTHER; note = thymine
  source 1..20: mol_type = other RNA
ctgtaggcataaattggtat

SEQ ID NO: 445 - RNA, 20 nt, synthetic construct
  modified_base 20: mod_base = OTHER; note = thymine
  misc_feature 1..20: note = HBV RNAi trigger sense strand
  modified_base 1: mod_base = OTHER; note = "2'-deoxy-3'-fluoro nucleoside"
  modified_base 3: mod_base = OTHER; note = "2'-deoxy-3'-fluoro nucleoside"
  modified_base 5: mod_base = OTHER; note = "2'-deoxy-3'-fluoro nucleoside"
  modified_base 7: mod_base = OTHER; note = "2'-deoxy-3'-fluoro nucleoside"
  modified_base 9: mod_base = OTHER; note = "2'-deoxy-3'-fluoro nucleoside"
  modified_base 11: mod_base = OTHER; note = "2'-deoxy-3'-fluoro nucleoside"
  modified_base 13: mod_base = OTHER; note = "2'-deoxy-3'-fluoro nucleoside"
  modified_base 15: mod_base = OTHER; note = "2'-deoxy-3'-fluoro nucleoside"
  modified_base 17: mod_base = OTHER; note = "2'-deoxy-3'-fluoro nucleoside"
  modified_base 19: mod_base = OTHER; note = "2'-deoxy-3'-fluoro nucleoside"
  modified_base 2: mod_base = OTHER; note = "2'-O-Methyl nucleoside"
  modified_base 4: mod_base = OTHER; note = "2'-O-Methyl nucleoside"
  modified_base 6: mod_base = OTHER; note = "2'-O-Methyl nucleoside"
  modified_base 8: mod_base = OTHER; note = "2'-O-Methyl nucleoside"
  modified_base 10: mod_base = OTHER; note = "2'-O-Methyl nucleoside"
  modified_base 12: mod_base = OTHER; note = "2'-O-Methyl nucleoside"
  modified_base 14: mod_base = OTHER; note = "2'-O-Methyl nucleoside"
  modified_base 16: mod_base = OTHER; note = "2'-O-Methyl nucleoside"
  modified_base 18: mod_base = OTHER; note = "2'-O-Methyl nucleoside"
  modified_base 20: mod_base = OTHER; note = "inverted nucleotide"
  modified_base 20: mod_base = OTHER; note = thymine
  source 1..20: mol_type = other RNA
acctctgcctaatcatctat

SEQ ID NO: 446 - RNA, 23 nt, synthetic construct
  modified_base 23: mod_base = OTHER; note = thymine
  misc_feature 1..23: note = HBV RNAi trigger sense strand
  modified_base 2: mod_base = OTHER; note = "2'-hydroxy nucleoside"
  modified_base 4: mod_base = OTHER; note = "2'-deoxy-3'-fluoro nucleoside"
  modified_base 6: mod_base = OTHER; note = "2'-deoxy-3'-fluoro nucleoside"
  modified_base 8: mod_base = OTHER; note = "2'-deoxy-3'-fluoro nucleoside"
  modified_base 10: mod_base = OTHER; note = "2'-deoxy-3'-fluoro nucleoside"
  modified_base 12: mod_base = OTHER; note = "2'-deoxy-3'-fluoro nucleoside"
  modified_base 14: mod_base = OTHER; note = "2'-deoxy-3'-fluoro nucleoside"
  modified_base 16: mod_base = OTHER; note = "2'-deoxy-3'-fluoro nucleoside"
  modified_base 18: mod_base = OTHER; note = "2'-deoxy-3'-fluoro nucleoside"
  modified_base 20: mod_base = OTHER; note = "2'-deoxy-3'-fluoro nucleoside"
  modified_base 22: mod_base = OTHER; note = "2'-deoxy-3'-fluoro nucleoside"
  modified_base 1: mod_base = OTHER; note = "2'-O-Methyl nucleoside"
  modified_base 3: mod_base = OTHER; note = "2'-O-Methyl nucleoside"
  modified_base 5: mod_base = OTHER; note = "2'-O-Methyl nucleoside"
  modified_base 7: mod_base = OTHER; note = "2'-O-Methyl nucleoside"
  modified_base 9: mod_base = OTHER; note = "2'-O-Methyl nucleoside"
  modified_base 11: mod_base = OTHER; note = "2'-O-Methyl nucleoside"
  modified_base 13: mod_base = OTHER; note = "2'-O-Methyl nucleoside"
  modified_base 15: mod_base = OTHER; note = "2'-O-Methyl nucleoside"
  modified_base 17: mod_base = OTHER; note = "2'-O-Methyl nucleoside"
  modified_base 19: mod_base = OTHER; note = "2'-O-Methyl nucleoside"
  modified_base 21: mod_base = OTHER; note = "2'-O-Methyl nucleoside"
  modified_base 23: mod_base = OTHER; note = "inverted nucleotide"
  modified_base 23: mod_base = OTHER; note = "TEG-Biotin modified nucleoside"
  modified_base 1: mod_base = OTHER; note = "Chol-C6 modified nucleoside"
  modified_base 23: mod_base = OTHER; note = thymine
  source 1..23: mol_type = other RNA
tatctgtaggcataaattggtat

SEQ ID NO: 447 - RNA, 23 nt, synthetic construct
  modified_base 23: mod_base = OTHER; note = thymine
  misc_feature 1..23: note = HBV RNAi trigger sense strand
  modified_base 2: mod_base = OTHER; note = "2'-hydroxy nucleoside"
  modified_base 4: mod_base = OTHER; note = "2'-deoxy-3'-fluoro nucleoside"
  modified_base 6: mod_base = OTHER; note = "2'-deoxy-3'-fluoro nucleoside"
  modified_base 8: mod_base = OTHER; note = "2'-deoxy-3'-fluoro nucleoside"
  modified_base 10: mod_base = OTHER; note = "2'-deoxy-3'-fluoro nucleoside"
  modified_base 12: mod_base = OTHER; note = "2'-deoxy-3'-fluoro nucleoside"
  modified_base 14: mod_base = OTHER; note = "2'-deoxy-3'-fluoro nucleoside"
  modified_base 16: mod_base = OTHER; note = "2'-deoxy-3'-fluoro nucleoside"
  modified_base 18: mod_base = OTHER; note = "2'-deoxy-3'-fluoro nucleoside"
  modified_base 20: mod_base = OTHER; note = "2'-deoxy-3'-fluoro nucleoside"
  modified_base 22: mod_base = OTHER; note = "2'-deoxy-3'-fluoro nucleoside"
  modified_base 1: mod_base = OTHER; note = "2'-O-Methyl nucleoside"
  modified_base 3: mod_base = OTHER; note = "2'-O-Methyl nucleoside"
  modified_base 5: mod_base = OTHER; note = "2'-O-Methyl nucleoside"
  modified_base 7: mod_base = OTHER; note = "2'-O-Methyl nucleoside"
  modified_base 9: mod_base = OTHER; note = "2'-O-Methyl nucleoside"
  modified_base 11: mod_base = OTHER; note = "2'-O-Methyl nucleoside"
  modified_base 13: mod_base = OTHER; note = "2'-O-Methyl nucleoside"
  modified_base 15: mod_base = OTHER; note = "2'-O-Methyl nucleoside"
  modified_base 17: mod_base = OTHER; note = "2'-O-Methyl nucleoside"
  modified_base 19: mod_base = OTHER; note = "2'-O-Methyl nucleoside"
  modified_base 21: mod_base = OTHER; note = "2'-O-Methyl nucleoside"
  modified_base 23: mod_base = OTHER; note = "inverted nucleotide"
  modified_base 23: mod_base = OTHER; note = "TEG-Biotin modified nucleoside"
  modified_base 1: mod_base = OTHER; note = "Chol-C6 modified nucleoside"
  modified_base 23: mod_base = OTHER; note = thymine
  source 1..23: mol_type = other RNA
tatacctctgcctaatcatctat

SEQ ID NO: 448 - RNA, 20 nt, synthetic construct
  modified_base 20: mod_base = OTHER; note = thymine
  misc_feature 1..20: note = HBV RNAi trigger sense strand
  modified_base 1: mod_base = OTHER; note = "2'-deoxy-3'-fluoro nucleoside"
  modified_base 3: mod_base = OTHER; note = "2'-deoxy-3'-fluoro nucleoside"
  modified_base 5: mod_base = OTHER; note = "2'-deoxy-3'-fluoro nucleoside"
  modified_base 7..9: mod_base = OTHER; note = "2'-deoxy-3'-fluoro nucleoside"
  modified_base 11: mod_base = OTHER; note = "2'-deoxy-3'-fluoro nucleoside"
  modified_base 13: mod_base = OTHER; note = "2'-deoxy-3'-fluoro nucleoside"
  modified_base 15: mod_base = OTHER; note = "2'-deoxy-3'-fluoro nucleoside"
  modified_base 17: mod_base = OTHER; note = "2'-deoxy-3'-fluoro nucleoside"
  modified_base 19: mod_base = OTHER; note = "2'-deoxy-3'-fluoro nucleoside"
  modified_base 2: mod_base = OTHER; note = "2'-O-Methyl nucleoside"
  modified_base 4: mod_base = OTHER; note = "2'-O-Methyl nucleoside"
  modified_base 6: mod_base = OTHER; note = "2'-O-Methyl nucleoside"
  modified_base 10: mod_base = OTHER; note = "2'-O-Methyl nucleoside"
  modified_base 12: mod_base = OTHER; note = "2'-O-Methyl nucleoside"
  modified_base 14: mod_base = OTHER; note = "2'-O-Methyl nucleoside"
  modified_base 16: mod_base = OTHER; note = "2'-O-Methyl nucleoside"
  modified_base 18: mod_base = OTHER; note = "2'-O-Methyl nucleoside"
  modified_base 20: mod_base = OTHER; note = "inverted nucleotide"
  modified_base 1: mod_base = OTHER; note = "NH2-C6 modified nucleoside"
  modified_base 20: mod_base = OTHER; note = thymine
  source 1..20: mol_type = other RNA
gtgtaggcataaattggtat

SEQ ID NO: 449 - RNA, 20 nt, synthetic construct
  modified_base 20: mod_base = OTHER; note = thymine
  misc_feature 1..20: note = HBV RNAi trigger sense strand
  modified_base 1: mod_base = OTHER; note = "2'-deoxy-3'-fluoro nucleoside"
  modified_base 3: mod_base = OTHER; note = "2'-deoxy-3'-fluoro nucleoside"
  modified_base 5: mod_base = OTHER; note = "2'-deoxy-3'-fluoro nucleoside"
  modified_base 7..9: mod_base = OTHER; note = "2'-deoxy-3'-fluoro nucleoside"
  modified_base 11: mod_base = OTHER; note = "2'-deoxy-3'-fluoro nucleoside"
  modified_base 13: mod_base = OTHER; note = "2'-deoxy-3'-fluoro nucleoside"
  modified_base 15: mod_base = OTHER; note = "2'-deoxy-3'-fluoro nucleoside"
  modified_base 17: mod_base = OTHER; note = "2'-deoxy-3'-fluoro nucleoside"
  modified_base 19: mod_base = OTHER; note = "2'-deoxy-3'-fluoro nucleoside"
  modified_base 2: mod_base = OTHER; note = "2'-O-Methyl nucleoside"
  modified_base 4: mod_base = OTHER; note = "2'-O-Methyl nucleoside"
  modified_base 6: mod_base = OTHER; note = "2'-O-Methyl nucleoside"
  modified_base 10: mod_base = OTHER; note = "2'-O-Methyl nucleoside"
  modified_base 12: mod_base = OTHER; note = "2'-O-Methyl nucleoside"
  modified_base 14: mod_base = OTHER; note = "2'-O-Methyl nucleoside"
  modified_base 16: mod_base = OTHER; note = "2'-O-Methyl nucleoside"
  modified_base 18: mod_base = OTHER; note = "2'-O-Methyl nucleoside"
  modified_base 20: mod_base = OTHER; note = "inverted nucleotide"
  modified_base 18..19: mod_base = OTHER; note = "phosphorothioate linked nucleoside"
  modified_base 1: mod_base = OTHER; note = "NH2-C6 modified nucleoside"
  modified_base 20: mod_base = OTHER; note = thymine
  source 1..20: mol_type = other RNA
gtgtaggcataaattggtat

SEQ ID NO: 450 - RNA, 20 nt, synthetic construct
  modified_base 20: mod_base = OTHER; note = thymine
  misc_feature 1..20: note = HBV RNAi trigger sense strand
  modified_base 1: mod_base = OTHER; note = "2'-deoxy-3'-fluoro nucleoside"
  modified_base 3: mod_base = OTHER; note = "2'-deoxy-3'-fluoro nucleoside"
  modified_base 5: mod_base = OTHER; note = "2'-deoxy-3'-fluoro nucleoside"
  modified_base 7..9: mod_base = OTHER; note = "2'-deoxy-3'-fluoro nucleoside"
  modified_base 11: mod_base = OTHER; note = "2'-deoxy-3'-fluoro nucleoside"
  modified_base 13: mod_base = OTHER; note = "2'-deoxy-3'-fluoro nucleoside"
  modified_base 15: mod_base = OTHER; note = "2'-deoxy-3'-fluoro nucleoside"
  modified_base 17: mod_base = OTHER; note = "2'-deoxy-3'-fluoro nucleoside"
  modified_base 19: mod_base = OTHER; note = "2'-deoxy-3'-fluoro nucleoside"
  modified_base 2: mod_base = OTHER; note = "2'-O-Methyl nucleoside"
  modified_base 4: mod_base = OTHER; note = "2'-O-Methyl nucleoside"
  modified_base 6: mod_base = OTHER; note = "2'-O-Methyl nucleoside"
  modified_base 10: mod_base = OTHER; note = "2'-O-Methyl nucleoside"
  modified_base 12: mod_base = OTHER; note = "2'-O-Methyl nucleoside"
  modified_base 14: mod_base = OTHER; note = "2'-O-Methyl nucleoside"
  modified_base 16: mod_base = OTHER; note = "2'-O-Methyl nucleoside"
  modified_base 18: mod_base = OTHER; note = "2'-O-Methyl nucleoside"
  modified_base 20: mod_base = OTHER; note = "inverted nucleotide"
  modified_base 18..19: mod_base = OTHER; note = "phosphorothioate linked nucleoside"
  modified_base 1: mod_base = OTHER; note = "NH2-C6 modified nucleoside"
  modified_base 20: mod_base = OTHER; note = thymine
  source 1..20: mol_type = other RNA
ccctctgcctaatcatctat

SEQ ID NO: 451 - RNA, 20 nt, synthetic construct
  modified_base 20: mod_base = OTHER; note = thymine
  misc_feature 1..20: note = HBV RNAi trigger sense strand
  modified_base 1: mod_base = OTHER; note = "2'-deoxy-3'-fluoro nucleoside"
  modified_base 3: mod_base = OTHER; note = "2'-deoxy-3'-fluoro nucleoside"
  modified_base 5: mod_base = OTHER; note = "2'-deoxy-3'-fluoro nucleoside"
  modified_base 7..9: mod_base = OTHER; note = "2'-deoxy-3'-fluoro nucleoside"
  modified_base 11: mod_base = OTHER; note = "2'-deoxy-3'-fluoro nucleoside"
  modified_base 13: mod_base = OTHER; note = "2'-deoxy-3'-fluoro nucleoside"
  modified_base 15: mod_base = OTHER; note = "2'-deoxy-3'-fluoro nucleoside"
  modified_base 17: mod_base = OTHER; note = "2'-deoxy-3'-fluoro nucleoside"
  modified_base 19: mod_base = OTHER; note = "2'-deoxy-3'-fluoro nucleoside"
  modified_base 2: mod_base = OTHER; note = "2'-O-Methyl nucleoside"
  modified_base 4: mod_base = OTHER; note = "2'-O-Methyl nucleoside"
  modified_base 6: mod_base = OTHER; note = "2'-O-Methyl nucleoside"
  modified_base 10: mod_base = OTHER; note = "2'-O-Methyl nucleoside"
  modified_base 12: mod_base = OTHER; note = "2'-O-Methyl nucleoside"
  modified_base 14: mod_base = OTHER; note = "2'-O-Methyl nucleoside"
  modified_base 16: mod_base = OTHER; note = "2'-O-Methyl nucleoside"
  modified_base 18: mod_base = OTHER; note = "2'-O-Methyl nucleoside"
  modified_base 20: mod_base = OTHER; note = "inverted nucleotide"
  modified_base 1: mod_base = OTHER; note = "NH2-C6 modified nucleoside"
  modified_base 20: mod_base = OTHER; note = thymine
  source 1..20: mol_type = other RNA
tttactagtgccatttgtat

SEQ ID NO: 452 - RNA, 20 nt, synthetic construct
  modified_base 20: mod_base = OTHER; note = thymine
  misc_feature 1..20: note = HBV RNAi trigger sense strand
  modified_base 1: mod_base = OTHER; note = "2'-deoxy-3'-fluoro nucleoside"
  modified_base 3: mod_base = OTHER; note = "2'-deoxy-3'-fluoro nucleoside"
  modified_base 5: mod_base = OTHER; note = "2'-deoxy-3'-fluoro nucleoside"
  modified_base 7..9: mod_base = OTHER; note = "2'-deoxy-3'-fluoro nucleoside"
  modified_base 11: mod_base = OTHER; note = "2'-deoxy-3'-fluoro nucleoside"
  modified_base 13: mod_base = OTHER; note = "2'-deoxy-3'-fluoro nucleoside"
  modified_base 15: mod_base = OTHER; note = "2'-deoxy-3'-fluoro nucleoside"
  modified_base 17: mod_base = OTHER; note = "2'-deoxy-3'-fluoro nucleoside"
  modified_base 19: mod_base = OTHER; note = "2'-deoxy-3'-fluoro nucleoside"
  modified_base 2: mod_base = OTHER; note = "2'-O-Methyl nucleoside"
  modified_base 4: mod_base = OTHER; note = "2'-O-Methyl nucleoside"
  modified_base 6: mod_base = OTHER; note = "2'-O-Methyl nucleoside"
  modified_base 10: mod_base = OTHER; note = "2'-O-Methyl nucleoside"
  modified_base 12: mod_base = OTHER; note = "2'-O-Methyl nucleoside"
  modified_base 14: mod_base = OTHER; note = "2'-O-Methyl nucleoside"
  modified_base 16: mod_base = OTHER; note = "2'-O-Methyl nucleoside"
  modified_base 18: mod_base = OTHER; note = "2'-O-Methyl nucleoside"
  modified_base 20: mod_base = OTHER; note = "inverted nucleotide"
  modified_base 18..19: mod_base = OTHER; note = "phosphorothioate linked nucleoside"
  modified_base 1: mod_base = OTHER; note = "NH2-C6 modified nucleoside"
  modified_base 20: mod_base = OTHER; note = thymine
  source 1..20: mol_type = other RNA
tttactagtgccatttgtat

SEQ ID NO: 453 - RNA, 20 nt, synthetic construct
  modified_base 20: mod_base = OTHER; note = thymine
  misc_feature 1..20: note = HBV RNAi trigger sense strand
  modified_base 1: mod_base = OTHER; note = "2'-deoxy-3'-fluoro nucleoside"
  modified_base 3: mod_base = OTHER; note = "2'-deoxy-3'-fluoro nucleoside"
  modified_base 5: mod_base = OTHER; note = "2'-deoxy-3'-fluoro nucleoside"
  modified_base 7: mod_base = OTHER; note = "2'-deoxy-3'-fluoro nucleoside"
  modified_base 9: mod_base = OTHER; note = "2'-deoxy-3'-fluoro nucleoside"
  modified_base 11: mod_base = OTHER; note = "2'-deoxy-3'-fluoro nucleoside"
  modified_base 13: mod_base = OTHER; note = "2'-deoxy-3'-fluoro nucleoside"
  modified_base 15: mod_base = OTHER; note = "2'-deoxy-3'-fluoro nucleoside"
  modified_base 17: mod_base = OTHER; note = "2'-deoxy-3'-fluoro nucleoside"
  modified_base 19: mod_base = OTHER; note = "2'-deoxy-3'-fluoro nucleoside"
  modified_base 2: mod_base = OTHER; note = "2'-O-Methyl nucleoside"
  modified_base 4: mod_base = OTHER; note = "2'-O-Methyl nucleoside"
  modified_base 6: mod_base = OTHER; note = "2'-O-Methyl nucleoside"
  modified_base 8: mod_base = OTHER; note = "2'-O-Methyl nucleoside"
  modified_base 10: mod_base = OTHER; note = "2'-O-Methyl nucleoside"
  modified_base 12: mod_base = OTHER; note = "2'-O-Methyl nucleoside"
  modified_base 14: mod_base = OTHER; note = "2'-O-Methyl nucleoside"
  modified_base 16: mod_base = OTHER; note = "2'-O-Methyl nucleoside"
  modified_base 18: mod_base = OTHER; note = "2'-O-Methyl nucleoside"
  modified_base 20: mod_base = OTHER; note = "inverted nucleotide"
  modified_base 1: mod_base = OTHER; note = "Alk-SS-C6 modified nucleoside"
  modified_base 20: mod_base = OTHER; note = thymine
  source 1..20: mol_type = other RNA
ctgtaggcataaattggtat

SEQ ID NO: 454 - RNA, 20 nt, synthetic construct
  modified_base 20: mod_base = OTHER; note = thymine
  misc_feature 1..20: note = HBV RNAi trigger sense strand
  modified_base 1: mod_base = OTHER; note = "2'-deoxy-3'-fluoro nucleoside"
  modified_base 3: mod_base = OTHER; note = "2'-deoxy-3'-fluoro nucleoside"
  modified_base 5: mod_base = OTHER; note = "2'-deoxy-3'-fluoro nucleoside"
  modified_base 7: mod_base = OTHER; note = "2'-deoxy-3'-fluoro nucleoside"
  modified_base 9: mod_base = OTHER; note = "2'-deoxy-3'-fluoro nucleoside"
  modified_base 11: mod_base = OTHER; note = "2'-deoxy-3'-fluoro nucleoside"
  modified_base 13: mod_base = OTHER; note = "2'-deoxy-3'-fluoro nucleoside"
  modified_base 15: mod_base = OTHER; note = "2'-deoxy-3'-fluoro nucleoside"
  modified_base 17: mod_base = OTHER; note = "2'-deoxy-3'-fluoro nucleoside"
  modified_base 19: mod_base = OTHER; note = "2'-deoxy-3'-fluoro nucleoside"
  modified_base 2: mod_base = OTHER; note = "2'-O-Methyl nucleoside"
  modified_base 4: mod_base = OTHER; note = "2'-O-Methyl nucleoside"
  modified_base 6: mod_base = OTHER; note = "2'-O-Methyl nucleoside"
  modified_base 8: mod_base = OTHER; note = "2'-O-Methyl nucleoside"
  modified_base 10: mod_base = OTHER; note = "2'-O-Methyl nucleoside"
  modified_base 12: mod_base = OTHER; note = "2'-O-Methyl nucleoside"
  modified_base 14: mod_base = OTHER; note = "2'-O-Methyl nucleoside"
  modified_base 16: mod_base = OTHER; note = "2'-O-Methyl nucleoside"
  modified_base 18: mod_base = OTHER; note = "2'-O-Methyl nucleoside"
  modified_base 20: mod_base = OTHER; note = "inverted nucleotide"
  modified_base 1: mod_base = OTHER; note = "Alk-SS-C6 modified nucleoside"
  modified_base 20: mod_base = OTHER; note = thymine
  source 1..20: mol_type = other RNA
acctctgcctaatcatctat

SEQ ID NO: 455 - RNA, 20 nt, synthetic construct
  modified_base 20: mod_base = OTHER; note = thymine
  misc_feature 1..20: note = HBV RNAi trigger sense strand
  modified_base 1: mod_base = OTHER; note = "2'-deoxy-3'-fluoro nucleoside"
  modified_base 3: mod_base = OTHER; note = "2'-deoxy-3'-fluoro nucleoside"
  modified_base 5: mod_base = OTHER; note = "2'-deoxy-3'-fluoro nucleoside"
  modified_base 7: mod_base = OTHER; note = "2'-deoxy-3'-fluoro nucleoside"
  modified_base 9: mod_base = OTHER; note = "2'-deoxy-3'-fluoro nucleoside"
  modified_base 11: mod_base = OTHER; note = "2'-deoxy-3'-fluoro nucleoside"
  modified_base 13: mod_base = OTHER; note = "2'-deoxy-3'-fluoro nucleoside"
  modified_base 15: mod_base = OTHER; note = "2'-deoxy-3'-fluoro nucleoside"
  modified_base 17: mod_base = OTHER; note = "2'-deoxy-3'-fluoro nucleoside"
  modified_base 19: mod_base = OTHER; note = "2'-deoxy-3'-fluoro nucleoside"
  modified_base 2: mod_base = OTHER; note = "2'-O-Methyl nucleoside"
  modified_base 4: mod_base = OTHER; note = "2'-O-Methyl nucleoside"
  modified_base 6: mod_base = OTHER; note = "2'-O-Methyl nucleoside"
  modified_base 8: mod_base = OTHER; note = "2'-O-Methyl nucleoside"
  modified_base 10: mod_base = OTHER; note = "2'-O-Methyl nucleoside"
  modified_base 12: mod_base = OTHER; note = "2'-O-Methyl nucleoside"
  modified_base 14: mod_base = OTHER; note = "2'-O-Methyl nucleoside"
  modified_base 16: mod_base = OTHER; note = "2'-O-Methyl nucleoside"
  modified_base 18: mod_base = OTHER; note = "2'-O-Methyl nucleoside"
  modified_base 20: mod_base = OTHER; note = "inverted nucleotide"
  modified_base 1: mod_base = OTHER; note = "Alk-SS-C6 modified nucleoside"
  modified_base 20: mod_base = OTHER; note = thymine
  source 1..20: mol_type = other RNA
tttactagtgccatttgtat

SEQ ID NO: 456 - RNA, 20 nt, synthetic construct
  modified_base 20: mod_base = OTHER; note = thymine
  misc_feature 1..20: note = HBV RNAi trigger sense strand
  modified_base 1: mod_base = OTHER; note = "2'-deoxy-3'-fluoro nucleoside"
  modified_base 3: mod_base = OTHER; note = "2'-deoxy-3'-fluoro nucleoside"
  modified_base 5: mod_base = OTHER; note = "2'-deoxy-3'-fluoro nucleoside"
  modified_base 7: mod_base = OTHER; note = "2'-deoxy-3'-fluoro nucleoside"
  modified_base 9: mod_base = OTHER; note = "2'-deoxy-3'-fluoro nucleoside"
  modified_base 11: mod_base = OTHER; note = "2'-deoxy-3'-fluoro nucleoside"
  modified_base 13: mod_base = OTHER; note = "2'-deoxy-3'-fluoro nucleoside"
  modified_base 15: mod_base = OTHER; note = "2'-deoxy-3'-fluoro nucleoside"
  modified_base 17: mod_base = OTHER; note = "2'-deoxy-3'-fluoro nucleoside"
  modified_base 19: mod_base = OTHER; note = "2'-deoxy-3'-fluoro nucleoside"
  modified_base 2: mod_base = OTHER; note = "2'-O-Methyl nucleoside"
  modified_base 4: mod_base = OTHER; note = "2'-O-Methyl nucleoside"
  modified_base 6: mod_base = OTHER; note = "2'-O-Methyl nucleoside"
  modified_base 8: mod_base = OTHER; note = "2'-O-Methyl nucleoside"
  modified_base 10: mod_base = OTHER; note = "2'-O-Methyl nucleoside"
  modified_base 12: mod_base = OTHER; note = "2'-O-Methyl nucleoside"
  modified_base 14: mod_base = OTHER; note = "2'-O-Methyl nucleoside"
  modified_base 16: mod_base = OTHER; note = "2'-O-Methyl nucleoside"
  modified_base 18: mod_base = OTHER; note = "2'-O-Methyl nucleoside"
  modified_base 20: mod_base = OTHER; note = "inverted nucleotide"
  modified_base 1: mod_base = OTHER; note = "NH2-C6 modified nucleoside"
  modified_base 20: mod_base = OTHER; note = thymine
  source 1..20: mol_type = other RNA
tctgcggcgttttatcatat

SEQ ID NO: 457 - RNA, 20 nt, synthetic construct
  modified_base 20: mod_base = OTHER; note = thymine
  misc_feature 1..20: note = HBV RNAi trigger sense strand
  modified_base 1: mod_base = OTHER; note = "2'-deoxy-3'-fluoro nucleoside"
  modified_base 3: mod_base = OTHER; note = "2'-deoxy-3'-fluoro nucleoside"
  modified_base 5: mod_base = OTHER; note = "2'-deoxy-3'-fluoro nucleoside"
  modified_base 7: mod_base = OTHER; note = "2'-deoxy-3'-fluoro nucleoside"
  modified_base 9: mod_base = OTHER; note = "2'-deoxy-3'-fluoro nucleoside"
  modified_base 11: mod_base = OTHER; note = "2'-deoxy-3'-fluoro nucleoside"
  modified_base 13: mod_base = OTHER; note = "2'-deoxy-3'-fluoro nucleoside"
  modified_base 15: mod_base = OTHER; note = "2'-deoxy-3'-fluoro nucleoside"
  modified_base 17: mod_base = OTHER; note = "2'-deoxy-3'-fluoro nucleoside"
  modified_base 19: mod_base = OTHER; note = "2'-deoxy-3'-fluoro nucleoside"
  modified_base 2: mod_base = OTHER; note = "2'-O-Methyl nucleoside"
  modified_base 4: mod_base = OTHER; note = "2'-O-Methyl nucleoside"
  modified_base 6: mod_base = OTHER; note = "2'-O-Methyl nucleoside"
  modified_base 8: mod_base = OTHER; note = "2'-O-Methyl nucleoside"
  modified_base 10: mod_base = OTHER; note = "2'-O-Methyl nucleoside"
  modified_base 12: mod_base = OTHER; note = "2'-O-Methyl nucleoside"
  modified_base 14: mod_base = OTHER; note = "2'-O-Methyl nucleoside"
  modified_base 16: mod_base = OTHER; note = "2'-O-Methyl nucleoside"
  modified_base 18: mod_base = OTHER; note = "2'-O-Methyl nucleoside"
  modified_base 20: mod_base = OTHER; note = "inverted nucleotide"
  modified_base 1: mod_base = OTHER; note = "Alk-SS-C6 modified nucleoside"
  modified_base 20: mod_base = OTHER; note = thymine
  source 1..20: mol_type = other RNA
tctgcggcgttttatcatat

SEQ ID NO: 458 - RNA, 20 nt, synthetic construct
  modified_base 20: mod_base = OTHER; note = thymine
  misc_feature 1..20: note = HBV RNAi trigger sense strand
  modified_base 1: mod_base = OTHER; note = "2'-deoxy-3'-fluoro nucleoside"
  modified_base 3: mod_base = OTHER; note = "2'-deoxy-3'-fluoro nucleoside"
  modified_base 5: mod_base = OTHER; note = "2'-deoxy-3'-fluoro nucleoside"
  modified_base 7..9: mod_base = OTHER; note = "2'-deoxy-3'-fluoro nucleoside"
  modified_base 11: mod_base = OTHER; note = "2'-deoxy-3'-fluoro nucleoside"
  modified_base 13: mod_base = OTHER; note = "2'-deoxy-3'-fluoro nucleoside"
  modified_base 15: mod_base = OTHER; note = "2'-deoxy-3'-fluoro nucleoside"
  modified_base 17: mod_base = OTHER; note = "2'-deoxy-3'-fluoro nucleoside"
  modified_base 19: mod_base = OTHER; note = "2'-deoxy-3'-fluoro nucleoside"
  modified_base 2: mod_base = OTHER; note = "2'-O-Methyl nucleoside"
  modified_base 4: mod_base = OTHER; note = "2'-O-Methyl nucleoside"
  modified_base 6: mod_base = OTHER; note = "2'-O-Methyl nucleoside"
  modified_base 10: mod_base = OTHER; note = "2'-O-Methyl nucleoside"
  modified_base 12: mod_base = OTHER; note = "2'-O-Methyl nucleoside"
  modified_base 14: mod_base = OTHER; note = "2'-O-Methyl nucleoside"
  modified_base 16: mod_base = OTHER; note = "2'-O-Methyl nucleoside"
  modified_base 18: mod_base = OTHER; note = "2'-O-Methyl nucleoside"
  modified_base 20: mod_base = OTHER; note = "inverted nucleotide"
  modified_base 1: mod_base = OTHER; note = "NH2-C6 modified nucleoside"
  modified_base 20: mod_base = OTHER; note = thymine
  source 1..20: mol_type = other RNA
tctgcggcgttttatcatat

SEQ ID NO: 459 - RNA, 20 nt, synthetic construct
  modified_base 20: mod_base = OTHER; note = thymine
  misc_feature 1..20: note = HBV RNAi trigger sense strand
  modified_base 1: mod_base = OTHER; note = "2'-deoxy-3'-fluoro nucleoside"
  modified_base 3: mod_base = OTHER; note = "2'-deoxy-3'-fluoro nucleoside"
  modified_base 5: mod_base = OTHER; note = "2'-deoxy-3'-fluoro nucleoside"
  modified_base 7..9: mod_base = OTHER; note = "2'-deoxy-3'-fluoro nucleoside"
  modified_base 11: mod_base = OTHER; note = "2'-deoxy-3'-fluoro nucleoside"
  modified_base 13: mod_base = OTHER; note = "2'-deoxy-3'-fluoro nucleoside"
  modified_base 15: mod_base = OTHER; note = "2'-deoxy-3'-fluoro nucleoside"
  modified_base 17: mod_base = OTHER; note = "2'-deoxy-3'-fluoro nucleoside"
  modified_base 19: mod_base = OTHER; note = "2'-deoxy-3'-fluoro nucleoside"
  modified_base 2: mod_base = OTHER; note = "2'-O-Methyl nucleoside"
  modified_base 4: mod_base = OTHER; note = "2'-O-Methyl nucleoside"
  modified_base 6: mod_base = OTHER; note = "2'-O-Methyl nucleoside"
  modified_base 10: mod_base = OTHER; note = "2'-O-Methyl nucleoside"
  modified_base 12: mod_base = OTHER; note = "2'-O-Methyl nucleoside"
  modified_base 14: mod_base = OTHER; note = "2'-O-Methyl nucleoside"
  modified_base 16: mod_base = OTHER; note = "2'-O-Methyl nucleoside"
  modified_base 18: mod_base = OTHER; note = "2'-O-Methyl nucleoside"
  modified_base 20: mod_base = OTHER; note = "inverted nucleotide"
  modified_base 18..19: mod_base = OTHER; note = "phosphorothioate linked nucleoside"
  modified_base 1: mod_base = OTHER; note = "NH2-C6 modified nucleoside"
  modified_base 20: mod_base = OTHER; note = thymine
  source 1..20: mol_type = other RNA
tctgcggcgttttatcatat

SEQ ID NO: 460 - RNA, 20 nt, synthetic construct
  modified_base 20: mod_base = OTHER; note = thymine
  misc_feature 1..20: note = HBV RNAi trigger sense strand
  modified_base 1: mod_base = OTHER; note = "2'-deoxy-3'-fluoro nucleoside"
  modified_base 3: mod_base = OTHER; note = "2'-deoxy-3'-fluoro nucleoside"
  modified_base 5: mod_base = OTHER; note = "2'-deoxy-3'-fluoro nucleoside"
  modified_base 7..9: mod_base = OTHER; note = "2'-deoxy-3'-fluoro nucleoside"
  modified_base 11: mod_base = OTHER; note = "2'-deoxy-3'-fluoro nucleoside"
  modified_base 13: mod_base = OTHER; note = "2'-deoxy-3'-fluoro nucleoside"
  modified_base 15: mod_base = OTHER; note = "2'-deoxy-3'-fluoro nucleoside"
  modified_base 17: mod_base = OTHER; note = "2'-deoxy-3'-fluoro nucleoside"
  modified_base 19: mod_base = OTHER; note = "2'-deoxy-3'-fluoro nucleoside"
  modified_base 2: mod_base = OTHER; note = "2'-O-Methyl nucleoside"
  modified_base 4: mod_base = OTHER; note = "2'-O-Methyl nucleoside"
  modified_base 6: mod_base = OTHER; note = "2'-O-Methyl nucleoside"
  modified_base 10: mod_base = OTHER; note = "2'-O-Methyl nucleoside"
  modified_base 12: mod_base = OTHER; note = "2'-O-Methyl nucleoside"
  modified_base 14: mod_base = OTHER; note = "2'-O-Methyl nucleoside"
  modified_base 16: mod_base = OTHER; note = "2'-O-Methyl nucleoside"
  modified_base 18: mod_base = OTHER; note = "2'-O-Methyl nucleoside"
  modified_base 20: mod_base = OTHER; note = "inverted nucleotide"
  modified_base 1: mod_base = OTHER; note = "Alk-SS-C6 modified nucleoside"
  modified_base 20: mod_base = OTHER; note = thymine
  source 1..20: mol_type = other RNA
acctctgcctaatcatctat

SEQ ID NO: 461 - RNA, 20 nt, synthetic construct
  modified_base 20: mod_base = OTHER; note = thymine
  misc_feature 1..20: note = HBV RNAi trigger sense strand
  modified_base 1: mod_base = OTHER; note = "2'-deoxy-3'-fluoro nucleoside"
  modified_base 3: mod_base = OTHER; note = "2'-deoxy-3'-fluoro nucleoside"
  modified_base 5: mod_base = OTHER; note = "2'-deoxy-3'-fluoro nucleoside"
  modified_base 7..9: mod_base = OTHER; note = "2'-deoxy-3'-fluoro nucleoside"
  modified_base 11: mod_base = OTHER; note = "2'-deoxy-3'-fluoro nucleoside"
  modified_base 13: mod_base = OTHER; note = "2'-deoxy-3'-fluoro nucleoside"
  modified_base 15: mod_base = OTHER; note = "2'-deoxy-3'-fluoro nucleoside"
  modified_base 17: mod_base = OTHER; note = "2'-deoxy-3'-fluoro nucleoside"
  modified_base 19: mod_base = OTHER; note = "2'-deoxy-3'-fluoro nucleoside"
  modified_base 2: mod_base = OTHER; note = "2'-O-Methyl nucleoside"
  modified_base 4: mod_base = OTHER; note = "2'-O-Methyl nucleoside"
  modified_base 6: mod_base = OTHER; note = "2'-O-Methyl nucleoside"
  modified_base 10: mod_base = OTHER; note = "2'-O-Methyl nucleoside"
  modified_base 12: mod_base = OTHER; note = "2'-O-Methyl nucleoside"
  modified_base 14: mod_base = OTHER; note = "2'-O-Methyl nucleoside"
  modified_base 16: mod_base = OTHER; note = "2'-O-Methyl nucleoside"
  modified_base 18: mod_base = OTHER; note = "2'-O-Methyl nucleoside"
  modified_base 20: mod_base = OTHER; note = "inverted nucleotide"
  modified_base 18..19: mod_base = OTHER; note = "phosphorothioate linked nucleoside"
  modified_base 1: mod_base = OTHER; note = "Alk-SS-C6 modified nucleoside"
  modified_base 20: mod_base = OTHER; note = thymine
  source 1..20: mol_type = other RNA
acctctgcctaatcatctat

SEQ ID NO: 462 - RNA, 20 nt, synthetic construct
  modified_base 20: mod_base = OTHER; note = thymine
  misc_feature 1..20: note = HBV RNAi trigger sense strand
  modified_base 1: mod_base = OTHER; note = "2'-deoxy-3'-fluoro nucleoside"
  modified_base 3: mod_base = OTHER; note = "2'-deoxy-3'-fluoro nucleoside"
  modified_base 5: mod_base = OTHER; note = "2'-deoxy-3'-fluoro nucleoside"
  modified_base 7..9: mod_base = OTHER; note = "2'-deoxy-3'-fluoro nucleoside"
  modified_base 11: mod_base = OTHER; note = "2'-deoxy-3'-fluoro nucleoside"
  modified_base 13: mod_base = OTHER; note = "2'-deoxy-3'-fluoro nucleoside"
  modified_base 15: mod_base = OTHER; note = "2'-deoxy-3'-fluoro nucleoside"
  modified_base 17: mod_base = OTHER; note = "2'-deoxy-3'-fluoro nucleoside"
  modified_base 19: mod_base = OTHER; note = "2'-deoxy-3'-fluoro nucleoside"
  modified_base 2: mod_base = OTHER; note = "2'-O-Methyl nucleoside"
  modified_base 4: mod_base = OTHER; note = "2'-O-Methyl nucleoside"
  modified_base 6: mod_base = OTHER; note = "2'-O-Methyl nucleoside"
  modified_base 10: mod_base = OTHER; note = "2'-O-Methyl nucleoside"
  modified_base 12: mod_base = OTHER; note = "2'-O-Methyl nucleoside"
  modified_base 14: mod_base = OTHER; note = "2'-O-Methyl nucleoside"
  modified_base 16: mod_base = OTHER; note = "2'-O-Methyl nucleoside"
  modified_base 18: mod_base = OTHER; note = "2'-O-Methyl nucleoside"
  modified_base 20: mod_base = OTHER; note = "inverted nucleotide"
  modified_base 1: mod_base = OTHER; note = "Alk-SS-C6 modified nucleoside"
  modified_base 20: mod_base = OTHER; note = thymine
  source 1..20: mol_type = other RNA
ctgtaggcataaattggtat

SEQ ID NO: 463 - RNA, 20 nt, synthetic construct
  modified_base 20: mod_base = OTHER; note = thymine
  misc_feature 1..20: note = HBV RNAi trigger sense strand
  modified_base 1: mod_base = OTHER; note = "2'-deoxy-3'-fluoro nucleoside"
  modified_base 3: mod_base = OTHER; note = "2'-deoxy-3'-fluoro nucleoside"
  modified_base 5: mod_base = OTHER; note = "2'-deoxy-3'-fluoro nucleoside"
  modified_base 7..9: mod_base = OTHER; note = "2'-deoxy-3'-fluoro nucleoside"
  modified_base 11: mod_base = OTHER; note = "2'-deoxy-3'-fluoro nucleoside"
  modified_base 13: mod_base = OTHER; note = "2'-deoxy-3'-fluoro nucleoside"
  modified_base 15: mod_base = OTHER; note = "2'-deoxy-3'-fluoro nucleoside"
  modified_base 17: mod_base = OTHER; note = "2'-deoxy-3'-fluoro nucleoside"
  modified_base 19: mod_base = OTHER; note = "2'-deoxy-3'-fluoro nucleoside"
  modified_base 2: mod_base = OTHER; note = "2'-O-Methyl nucleoside"
  modified_base 4: mod_base = OTHER; note = "2'-O-Methyl nucleoside"
  modified_base 6: mod_base = OTHER; note = "2'-O-Methyl nucleoside"
  modified_base 10: mod_base = OTHER; note = "2'-O-Methyl nucleoside"
  modified_base 12: mod_base = OTHER; note = "2'-O-Methyl nucleoside"
  modified_base 14: mod_base = OTHER; note = "2'-O-Methyl nucleoside"
  modified_base 16: mod_base = OTHER; note = "2'-O-Methyl nucleoside"
  modified_base 18: mod_base = OTHER; note = "2'-O-Methyl nucleoside"
  modified_base 20: mod_base = OTHER; note = "inverted nucleotide"
  modified_base 18..19: mod_base = OTHER; note = "phosphorothioate linked nucleoside"
  modified_base 1: mod_base = OTHER; note = "Alk-SS-C6 modified nucleoside"
  modified_base 20: mod_base = OTHER; note = thymine
  source 1..20: mol_type = other RNA
ctgtaggcataaattggtat

SEQ ID NO: 464 - RNA, 20 nt, synthetic construct
  modified_base 20: mod_base = OTHER; note = thymine
  misc_feature 1..20: note = HBV RNAi trigger sense strand
  modified_base 1: mod_base = OTHER; note = "2'-deoxy-3'-fluoro nucleoside"
  modified_base 3: mod_base = OTHER; note = "2'-deoxy-3'-fluoro nucleoside"
  modified_base 5: mod_base = OTHER; note = "2'-deoxy-3'-fluoro nucleoside"
  modified_base 7..9: mod_base = OTHER; note = "2'-deoxy-3'-fluoro nucleoside"
  modified_base 11: mod_base = OTHER; note = "2'-deoxy-3'-fluoro nucleoside"
  modified_base 13: mod_base = OTHER; note = "2'-deoxy-3'-fluoro nucleoside"
  modified_base 15: mod_base = OTHER; note = "2'-deoxy-3'-fluoro nucleoside"
  modified_base 17: mod_base = OTHER; note = "2'-deoxy-3'-fluoro nucleoside"
  modified_base 19: mod_base = OTHER; note = "2'-deoxy-3'-fluoro nucleoside"
  modified_base 2: mod_base = OTHER; note = "2'-O-Methyl nucleoside"
  modified_base 4: mod_base = OTHER; note = "2'-O-Methyl nucleoside"
  modified_base 6: mod_base = OTHER; note = "2'-O-Methyl nucleoside"
  modified_base 10: mod_base = OTHER; note = "2'-O-Methyl nucleoside"
  modified_base 12: mod_base = OTHER; note = "2'-O-Methyl nucleoside"
  modified_base 14: mod_base = OTHER; note = "2'-O-Methyl nucleoside"
  modified_base 16: mod_base = OTHER; note = "2'-O-Methyl nucleoside"
  modified_base 18: mod_base = OTHER; note = "2'-O-Methyl nucleoside"
  modified_base 20: mod_base = OTHER; note = "inverted nucleotide"
  modified_base 18..19: mod_base = OTHER; note = "phosphorothioate linked nucleoside"
  modified_base 1: mod_base = OTHER; note = "Alk-SS-C6 modified nucleoside"
  modified_base 20: mod_base = OTHER; note = thymine
  source 1..20: mol_type = other RNA
tttactagtgccatttgtat

SEQ ID NO: 465 - RNA, 20 nt, synthetic construct
  modified_base 20: mod_base = OTHER; note = thymine
  misc_feature 1..20: note = HBV RNAi trigger sense strand
  modified_base 1: mod_base = OTHER; note = "2'-deoxy-3'-fluoro nucleoside"
  modified_base 3: mod_base = OTHER; note = "2'-deoxy-3'-fluoro nucleoside"
  modified_base 5: mod_base = OTHER; note = "2'-deoxy-3'-fluoro nucleoside"
  modified_base 7..9: mod_base = OTHER; note = "2'-deoxy-3'-fluoro nucleoside"
  modified_base 11: mod_base = OTHER; note = "2'-deoxy-3'-fluoro nucleoside"
  modified_base 13: mod_base = OTHER; note = "2'-deoxy-3'-fluoro nucleoside"
  modified_base 15: mod_base = OTHER; note = "2'-deoxy-3'-fluoro nucleoside"
  modified_base 17: mod_base = OTHER; note = "2'-deoxy-3'-fluoro nucleoside"
  modified_base 19: mod_base = OTHER; note = "2'-deoxy-3'-fluoro nucleoside"
  modified_base 2: mod_base = OTHER; note = "2'-O-Methyl nucleoside"
  modified_base 4: mod_base = OTHER; note = "2'-O-Methyl nucleoside"
  modified_base 6: mod_base = OTHER; note = "2'-O-Methyl nucleoside"
  modified_base 10: mod_base = OTHER; note = "2'-O-Methyl nucleoside"
  modified_base 12: mod_base = OTHER; note = "2'-O-Methyl nucleoside"
  modified_base 14: mod_base = OTHER; note = "2'-O-Methyl nucleoside"
  modified_base 16: mod_base = OTHER; note = "2'-O-Methyl nucleoside"
  modified_base 18: mod_base = OTHER; note = "2'-O-Methyl nucleoside"
  modified_base 20: mod_base = OTHER; note = "inverted nucleotide"
  modified_base 18..19: mod_base = OTHER; note = "phosphorothioate linked nucleoside"
  modified_base 1: mod_base = OTHER; note = "Alk-SS-C6 modified nucleoside"
  modified_base 20: mod_base = OTHER; note = thymine
  source 1..20: mol_type = other RNA
tctgcggcgttttatcatat

SEQ ID NO: 466 - RNA, 20 nt, synthetic construct
  modified_base 20: mod_base = OTHER; note = thymine
  misc_feature 1..20: note = HBV RNAi trigger sense strand
  modified_base 1: mod_base = OTHER; note = "2'-deoxy-3'-fluoro nucleoside"
  modified_base 3: mod_base = OTHER; note = "2'-deoxy-3'-fluoro nucleoside"
  modified_base 5: mod_base = OTHER; note = "2'-deoxy-3'-fluoro nucleoside"
  modified_base 7: mod_base = OTHER; note = "2'-deoxy-3'-fluoro nucleoside"
  modified_base 9: mod_base = OTHER; note = "2'-deoxy-3'-fluoro nucleoside"
  modified_base 11: mod_base = OTHER; note = "2'-deoxy-3'-fluoro nucleoside"
  modified_base 13: mod_base = OTHER; note = "2'-deoxy-3'-fluoro nucleoside"
  modified_base 15: mod_base = OTHER; note = "2'-deoxy-3'-fluoro nucleoside"
  modified_base 17: mod_base = OTHER; note = "2'-deoxy-3'-fluoro nucleoside"
  modified_base 19: mod_base = OTHER; note = "2'-deoxy-3'-fluoro nucleoside"
  modified_base 2: mod_base = OTHER; note = "2'-O-Methyl nucleoside"
  modified_base 4: mod_base = OTHER; note = "2'-O-Methyl nucleoside"
  modified_base 6: mod_base = OTHER; note = "2'-O-Methyl nucleoside"
  modified_base 8: mod_base = OTHER; note = "2'-O-Methyl nucleoside"
  modified_base 10: mod_base = OTHER; note = "2'-O-Methyl nucleoside"
  modified_base 12: mod_base = OTHER; note = "2'-O-Methyl nucleoside"
  modified_base 14: mod_base = OTHER; note = "2'-O-Methyl nucleoside"
  modified_base 16: mod_base = OTHER; note = "2'-O-Methyl nucleoside"
  modified_base 18: mod_base = OTHER; note = "2'-O-Methyl nucleoside"
  modified_base 20: mod_base = OTHER; note = "inverted nucleotide"
  modified_base 18..19: mod_base = OTHER; note = "phosphorothioate linked nucleoside"
  modified_base 1: mod_base = OTHER; note = "Alk-SS-C6 modified nucleoside"
  modified_base 20: mod_base = OTHER; note = thymine
  source 1..20: mol_type = other RNA
ctgtaggcataaattggtat

SEQ ID NO: 467 - RNA, 20 nt, synthetic construct
  modified_base 20: mod_base = OTHER; note = thymine
  misc_feature 1..20: note = HBV RNAi trigger sense strand
  modified_base 1: mod_base = OTHER; note = "2'-deoxy-3'-fluoro nucleoside"
  modified_base 3: mod_base = OTHER; note = "2'-deoxy-3'-fluoro nucleoside"
  modified_base 5: mod_base = OTHER; note = "2'-deoxy-3'-fluoro nucleoside"
  modified_base 7: mod_base = OTHER; note = "2'-deoxy-3'-fluoro nucleoside"
  modified_base 9: mod_base = OTHER; note = "2'-deoxy-3'-fluoro nucleoside"
  modified_base 11: mod_base = OTHER; note = "2'-deoxy-3'-fluoro nucleoside"
  modified_base 13: mod_base = OTHER; note = "2'-deoxy-3'-fluoro nucleoside"
  modified_base 15: mod_base = OTHER; note = "2'-deoxy-3'-fluoro nucleoside"
  modified_base 17: mod_base = OTHER; note = "2'-deoxy-3'-fluoro nucleoside"
  modified_base 19: mod_base = OTHER; note = "2'-deoxy-3'-fluoro nucleoside"
  modified_base 2: mod_base = OTHER; note = "2'-O-Methyl nucleoside"
  modified_base 4: mod_base = OTHER; note = "2'-O-Methyl nucleoside"
  modified_base 6: mod_base = OTHER; note = "2'-O-Methyl nucleoside"
  modified_base 8: mod_base = OTHER; note = "2'-O-Methyl nucleoside"
  modified_base 10: mod_base = OTHER; note = "2'-O-Methyl nucleoside"
  modified_base 12: mod_base = OTHER; note = "2'-O-Methyl nucleoside"
  modified_base 14: mod_base = OTHER; note = "2'-O-Methyl nucleoside"
  modified_base 16: mod_base = OTHER; note = "2'-O-Methyl nucleoside"
  modified_base 18: mod_base = OTHER; note = "2'-O-Methyl nucleoside"
  modified_base 20: mod_base = OTHER; note = "inverted nucleotide"
  modified_base 18..19: mod_base = OTHER; note = "phosphorothioate linked nucleoside"
  modified_base 1: mod_base = OTHER; note = "Alk-SS-C6 modified nucleoside"
  modified_base 20: mod_base = OTHER; note = thymine
  source 1..20: mol_type = other RNA
acctctgcctaatcatctat

SEQ ID NO: 468 - RNA, 20 nt, synthetic construct
  modified_base 20: mod_base = OTHER; note = thymine
  misc_feature 1..20: note = HBV RNAi trigger sense strand
  modified_base 1: mod_base = OTHER; note = "2'-deoxy-3'-fluoro nucleoside"
  modified_base 3: mod_base = OTHER; note = "2'-deoxy-3'-fluoro nucleoside"
  modified_base 5: mod_base = OTHER; note = "2'-deoxy-3'-fluoro nucleoside"
  modified_base 7: mod_base = OTHER; note = "2'-deoxy-3'-fluoro nucleoside"
  modified_base 9: mod_base = OTHER; note = "2'-deoxy-3'-fluoro nucleoside"
  modified_base 11: mod_base = OTHER; note = "2'-deoxy-3'-fluoro nucleoside"
  modified_base 13: mod_base = OTHER; note = "2'-deoxy-3'-fluoro nucleoside"
  modified_base 15: mod_base = OTHER; note = "2'-deoxy-3'-fluoro nucleoside"
  modified_base 17: mod_base = OTHER; note = "2'-deoxy-3'-fluoro nucleoside"
  modified_base 19: mod_base = OTHER; note = "2'-deoxy-3'-fluoro nucleoside"
  modified_base 2: mod_base = OTHER; note = "2'-O-Methyl nucleoside"
  modified_base 4: mod_base = OTHER; note = "2'-O-Methyl nucleoside"
  modified_base 6: mod_base = OTHER; note = "2'-O-Methyl nucleoside"
  modified_base 8: mod_base = OTHER; note = "2'-O-Methyl nucleoside"
  modified_base 10: mod_base = OTHER; note = "2'-O-Methyl nucleoside"
  modified_base 12: mod_base = OTHER; note = "2'-O-Methyl nucleoside"
  modified_base 14: mod_base = OTHER; note = "2'-O-Methyl nucleoside"
  modified_base 16: mod_base = OTHER; note = "2'-O-Methyl nucleoside"
  modified_base 18: mod_base = OTHER; note = "2'-O-Methyl nucleoside"
  modified_base 20: mod_base = OTHER; note = "inverted nucleotide"
  modified_base 18..19: mod_base = OTHER; note = "phosphorothioate linked nucleoside"
  modified_base 1: mod_base = OTHER; note = "Alk-SS-C6 modified nucleoside"
  modified_base 20: mod_base = OTHER; note = thymine
  source 1..20: mol_type = other RNA
tttactagtgccatttgtat

SEQ ID NO: 469 - RNA, 20 nt, synthetic construct
  modified_base 20: mod_base = OTHER; note = thymine
  misc_feature 1..20: note = HBV RNAi trigger sense strand
  modified_base 1: mod_base = OTHER; note = "2'-deoxy-3'-fluoro nucleoside"
  modified_base 3: mod_base = OTHER; note = "2'-deoxy-3'-fluoro nucleoside"
  modified_base 5: mod_base = OTHER; note = "2'-deoxy-3'-fluoro nucleoside"
  modified_base 7: mod_base = OTHER; note = "2'-deoxy-3'-fluoro nucleoside"
  modified_base 9: mod_base = OTHER; note = "2'-deoxy-3'-fluoro nucleoside"
  modified_base 11: mod_base = OTHER; note = "2'-deoxy-3'-fluoro nucleoside"
  modified_base 13: mod_base = OTHER; note = "2'-deoxy-3'-fluoro nucleoside"
  modified_base 15: mod_base = OTHER; note = "2'-deoxy-3'-fluoro nucleoside"
  modified_base 17: mod_base = OTHER; note = "2'-deoxy-3'-fluoro nucleoside"
  modified_base 19: mod_base = OTHER; note = "2'-deoxy-3'-fluoro nucleoside"
  modified_base 2: mod_base = OTHER; note = "2'-O-Methyl nucleoside"
  modified_base 4: mod_base = OTHER; note = "2'-O-Methyl nucleoside"
  modified_base 6: mod_base = OTHER; note = "2'-O-Methyl nucleoside"
  modified_base 8: mod_base = OTHER; note = "2'-O-Methyl nucleoside"
  modified_base 10: mod_base = OTHER; note = "2'-O-Methyl nucleoside"
  modified_base 12: mod_base = OTHER; note = "2'-O-Methyl nucleoside"
  modified_base 14: mod_base = OTHER; note = "2'-O-Methyl nucleoside"
  modified_base 16: mod_base = OTHER; note = "2'-O-Methyl nucleoside"
  modified_base 18: mod_base = OTHER; note = "2'-O-Methyl nucleoside"
  modified_base 20: mod_base = OTHER; note = "inverted nucleotide"
  modified_base 18..19: mod_base = OTHER; note = "phosphorothioate linked nucleoside"
  modified_base 1: mod_base = OTHER; note = "Alk-SS-C6 modified nucleoside"
  modified_base 20: mod_base = OTHER; note = thymine
  source 1..20: mol_type = other RNA
tctgcggcgttttatcatat

SEQ ID NO: 470 - RNA, 23 nt, synthetic construct
  modified_base 23: mod_base = OTHER; note = thymine
  misc_feature 1..23: note = HBV RNAi trigger sense strand
  modified_base 2: mod_base = OTHER; note = "2'-hydroxy nucleoside"
  modified_base 4: mod_base = OTHER; note = "2'-deoxy-3'-fluoro nucleoside"
  modified_base 6: mod_base = OTHER; note = "2'-deoxy-3'-fluoro nucleoside"
  modified_base 8: mod_base = OTHER; note = "2'-deoxy-3'-fluoro nucleoside"
  modified_base 10..12: mod_base = OTHER; note = "2'-deoxy-3'-fluoro nucleoside"
  modified_base 14: mod_base = OTHER; note = "2'-deoxy-3'-fluoro nucleoside"
  modified_base 16: mod_base = OTHER; note = "2'-deoxy-3'-fluoro nucleoside"
  modified_base 18: mod_base = OTHER; note = "2'-deoxy-3'-fluoro nucleoside"
  modified_base 20: mod_base = OTHER; note = "2'-deoxy-3'-fluoro nucleoside"
  modified_base 22: mod_base = OTHER; note = "2'-deoxy-3'-fluoro nucleoside"
  modified_base 1: mod_base = OTHER; note = "2'-O-Methyl nucleoside"
  modified_base 3: mod_base = OTHER; note = "2'-O-Methyl nucleoside"
  modified_base 5: mod_base = OTHER; note = "2'-O-Methyl nucleoside"
  modified_base 7: mod_base = OTHER; note = "2'-O-Methyl nucleoside"
  modified_base 9: mod_base = OTHER; note = "2'-O-Methyl nucleoside"
  modified_base 13: mod_base = OTHER; note = "2'-O-Methyl nucleoside"
  modified_base 15: mod_base = OTHER; note = "2'-O-Methyl nucleoside"
  modified_base 17: mod_base = OTHER; note = "2'-O-Methyl nucleoside"
  modified_base 19: mod_base = OTHER; note = "2'-O-Methyl nucleoside"
  modified_base 21: mod_base = OTHER; note = "2'-O-Methyl nucleoside"
  modified_base 23: mod_base = OTHER; note = "inverted nucleotide"
  modified_base 1: mod_base = OTHER; note = "Chol-TEG modifed nucleoside"
  modified_base 23: mod_base = OTHER; note = thymine
  source 1..23: mol_type = other RNA
tatctgtaggcataaattggtat

SEQ ID NO: 471 - RNA, 23 nt, synthetic construct
  modified_base 23: mod_base = OTHER; note = thymine
  misc_feature 1..23: note = HBV RNAi trigger sense strand
  modified_base 2: mod_base = OTHER; note = "2'-hydroxy nucleoside"
  modified_base 4: mod_base = OTHER; note = "2'-deoxy-3'-fluoro nucleoside"
  modified_base 6: mod_base = OTHER; note = "2'-deoxy-3'-fluoro nucleoside"
  modified_base 8: mod_base = OTHER; note = "2'-deoxy-3'-fluoro nucleoside"
  modified_base 10..12: mod_base = OTHER; note = "2'-deoxy-3'-fluoro nucleoside"
  modified_base 14: mod_base = OTHER; note = "2'-deoxy-3'-fluoro nucleoside"
  modified_base 16: mod_base = OTHER; note = "2'-deoxy-3'-fluoro nucleoside"
  modified_base 18: mod_base = OTHER; note = "2'-deoxy-3'-fluoro nucleoside"
  modified_base 20: mod_base = OTHER; note = "2'-deoxy-3'-fluoro nucleoside"
  modified_base 22: mod_base = OTHER; note = "2'-deoxy-3'-fluoro nucleoside"
  modified_base 1: mod_base = OTHER; note = "2'-O-Methyl nucleoside"
  modified_base 3: mod_base = OTHER; note = "2'-O-Methyl nucleoside"
  modified_base 5: mod_base = OTHER; note = "2'-O-Methyl nucleoside"
  modified_base 7: mod_base = OTHER; note = "2'-O-Methyl nucleoside"
  modified_base 9: mod_base = OTHER; note = "2'-O-Methyl nucleoside"
  modified_base 13: mod_base = OTHER; note = "2'-O-Methyl nucleoside"
  modified_base 15: mod_base = OTHER; note = "2'-O-Methyl nucleoside"
  modified_base 17: mod_base = OTHER; note = "2'-O-Methyl nucleoside"
  modified_base 19: mod_base = OTHER; note = "2'-O-Methyl nucleoside"
  modified_base 21: mod_base = OTHER; note = "2'-O-Methyl nucleoside"
  modified_base 23: mod_base = OTHER; note = "inverted nucleotide"
  modified_base 1: mod_base = OTHER; note = "Chol-TEG modifed nucleoside"
  modified_base 23: mod_base = OTHER; note = thymine
  source 1..23: mol_type = other RNA
tatacctctgcctaatcatctat

SEQ ID NO: 472 - RNA, 23 nt, synthetic construct
  modified_base 23: mod_base = OTHER; note = thymine
  misc_feature 1..23: note = HBV RNAi trigger sense strand
  modified_base 2: mod_base = OTHER; note = "2'-hydroxy nucleoside"
  modified_base 4: mod_base = OTHER; note = "2'-deoxy-3'-fluoro nucleoside"
  modified_base 6: mod_base = OTHER; note = "2'-deoxy-3'-fluoro nucleoside"
  modified_base 8: mod_base = OTHER; note = "2'-deoxy-3'-fluoro nucleoside"
  modified_base 10..12: mod_base = OTHER; note = "2'-deoxy-3'-fluoro nucleoside"
  modified_base 14: mod_base = OTHER; note = "2'-deoxy-3'-fluoro nucleoside"
  modified_base 16: mod_base = OTHER; note = "2'-deoxy-3'-fluoro nucleoside"
  modified_base 18: mod_base = OTHER; note = "2'-deoxy-3'-fluoro nucleoside"
  modified_base 20: mod_base = OTHER; note = "2'-deoxy-3'-fluoro nucleoside"
  modified_base 22: mod_base = OTHER; note = "2'-deoxy-3'-fluoro nucleoside"
  modified_base 1: mod_base = OTHER; note = "2'-O-Methyl nucleoside"
  modified_base 3: mod_base = OTHER; note = "2'-O-Methyl nucleoside"
  modified_base 5: mod_base = OTHER; note = "2'-O-Methyl nucleoside"
  modified_base 7: mod_base = OTHER; note = "2'-O-Methyl nucleoside"
  modified_base 9: mod_base = OTHER; note = "2'-O-Methyl nucleoside"
  modified_base 13: mod_base = OTHER; note = "2'-O-Methyl nucleoside"
  modified_base 15: mod_base = OTHER; note = "2'-O-Methyl nucleoside"
  modified_base 17: mod_base = OTHER; note = "2'-O-Methyl nucleoside"
  modified_base 19: mod_base = OTHER; note = "2'-O-Methyl nucleoside"
  modified_base 21: mod_base = OTHER; note = "2'-O-Methyl nucleoside"
  modified_base 23: mod_base = OTHER; note = "inverted nucleotide"
  modified_base 1: mod_base = OTHER; note = "Chol-TEG modifed nucleoside"
  modified_base 23: mod_base = OTHER; note = thymine
  source 1..23: mol_type = other RNA
tattttactagtgccatttgtat

SEQ ID NO: 473 - RNA, 23 nt, synthetic construct
  modified_base 23: mod_base = OTHER; note = thymine
  misc_feature 1..23: note = HBV RNAi trigger sense strand
  modified_base 2: mod_base = OTHER; note = "2'-hydroxy nucleoside"
  modified_base 4: mod_base = OTHER; note = "2'-deoxy-3'-fluoro nucleoside"
  modified_base 6: mod_base = OTHER; note = "2'-deoxy-3'-fluoro nucleoside"
  modified_base 8: mod_base = OTHER; note = "2'-deoxy-3'-fluoro nucleoside"
  modified_base 10..12: mod_base = OTHER; note = "2'-deoxy-3'-fluoro nucleoside"
  modified_base 14: mod_base = OTHER; note = "2'-deoxy-3'-fluoro nucleoside"
  modified_base 16: mod_base = OTHER; note = "2'-deoxy-3'-fluoro nucleoside"
  modified_base 18: mod_base = OTHER; note = "2'-deoxy-3'-fluoro nucleoside"
  modified_base 20: mod_base = OTHER; note = "2'-deoxy-3'-fluoro nucleoside"
  modified_base 22: mod_base = OTHER; note = "2'-deoxy-3'-fluoro nucleoside"
  modified_base 1: mod_base = OTHER; note = "2'-O-Methyl nucleoside"
  modified_base 3: mod_base = OTHER; note = "2'-O-Methyl nucleoside"
  modified_base 5: mod_base = OTHER; note = "2'-O-Methyl nucleoside"
  modified_base 7: mod_base = OTHER; note = "2'-O-Methyl nucleoside"
  modified_base 9: mod_base = OTHER; note = "2'-O-Methyl nucleoside"
  modified_base 13: mod_base = OTHER; note = "2'-O-Methyl nucleoside"
  modified_base 15: mod_base = OTHER; note = "2'-O-Methyl nucleoside"
  modified_base 17: mod_base = OTHER; note = "2'-O-Methyl nucleoside"
  modified_base 19: mod_base = OTHER; note = "2'-O-Methyl nucleoside"
  modified_base 21: mod_base = OTHER; note = "2'-O-Methyl nucleoside"
  modified_base 23: mod_base = OTHER; note = "inverted nucleotide"
  modified_base 1: mod_base = OTHER; note = "Chol-TEG modifed nucleoside"
  modified_base 23: mod_base = OTHER; note = thymine
  source 1..23: mol_type = other RNA
tattctgcggcgttttatcatat

SEQ ID NO: 474 - RNA, 23 nt, synthetic construct
  modified_base 23: mod_base = OTHER; note = thymine
  misc_feature 1..23: note = HBV RNAi trigger sense strand
  modified_base 2: mod_base = OTHER; note = "2'-hydroxy nucleoside"
  modified_base 4: mod_base = OTHER; note = "2'-deoxy-3'-fluoro nucleoside"
  modified_base 6: mod_base = OTHER; note = "2'-deoxy-3'-fluoro nucleoside"
  modified_base 8: mod_base = OTHER; note = "2'-deoxy-3'-fluoro nucleoside"
  modified_base 10..12: mod_base = OTHER; note = "2'-deoxy-3'-fluoro nucleoside"
  modified_base 14: mod_base = OTHER; note = "2'-deoxy-3'-fluoro nucleoside"
  modified_base 16: mod_base = OTHER; note = "2'-deoxy-3'-fluoro nucleoside"
  modified_base 18: mod_base = OTHER; note = "2'-deoxy-3'-fluoro nucleoside"
  modified_base 20: mod_base = OTHER; note = "2'-deoxy-3'-fluoro nucleoside"
  modified_base 22: mod_base = OTHER; note = "2'-deoxy-3'-fluoro nucleoside"
  modified_base 1: mod_base = OTHER; note = "2'-O-Methyl nucleoside"
  modified_base 3: mod_base = OTHER; note = "2'-O-Methyl nucleoside"
  modified_base 5: mod_base = OTHER; note = "2'-O-Methyl nucleoside"
  modified_base 7: mod_base = OTHER; note = "2'-O-Methyl nucleoside"
  modified_base 9: mod_base = OTHER; note = "2'-O-Methyl nucleoside"
  modified_base 13: mod_base = OTHER; note = "2'-O-Methyl nucleoside"
  modified_base 15: mod_base = OTHER; note = "2'-O-Methyl nucleoside"
  modified_base 17: mod_base = OTHER; note = "2'-O-Methyl nucleoside"
  modified_base 19: mod_base = OTHER; note = "2'-O-Methyl nucleoside"
  modified_base 21: mod_base = OTHER; note = "2'-O-Methyl nucleoside"
  modified_base 23: mod_base = OTHER; note = "inverted nucleotide"
  modified_base 1: mod_base = OTHER; note = "Chol-C6 modified nucleoside"
  modified_base 23: mod_base = OTHER; note = thymine
  source 1..23: mol_type = other RNA
tatctgtaggcataaattggtat

SEQ ID NO: 475 - RNA, 23 nt, synthetic construct
  modified_base 23: mod_base = OTHER; note = thymine
  misc_feature 1..23: note = HBV RNAi trigger sense strand
  modified_base 2: mod_base = OTHER; note = "2'-hydroxy nucleoside"
  modified_base 4: mod_base = OTHER; note = "2'-deoxy-3'-fluoro nucleoside"
  modified_base 6: mod_base = OTHER; note = "2'-deoxy-3'-fluoro nucleoside"
  modified_base 8: mod_base = OTHER; note = "2'-deoxy-3'-fluoro nucleoside"
  modified_base 10..12: mod_base = OTHER; note = "2'-deoxy-3'-fluoro nucleoside"
  modified_base 14: mod_base = OTHER; note = "2'-deoxy-3'-fluoro nucleoside"
  modified_base 16: mod_base = OTHER; note = "2'-deoxy-3'-fluoro nucleoside"
  modified_base 18: mod_base = OTHER; note = "2'-deoxy-3'-fluoro nucleoside"
  modified_base 20: mod_base = OTHER; note = "2'-deoxy-3'-fluoro nucleoside"
  modified_base 22: mod_base = OTHER; note = "2'-deoxy-3'-fluoro nucleoside"
  modified_base 1: mod_base = OTHER; note = "2'-O-Methyl nucleoside"
  modified_base 3: mod_base = OTHER; note = "2'-O-Methyl nucleoside"
  modified_base 5: mod_base = OTHER; note = "2'-O-Methyl nucleoside"
  modified_base 7: mod_base = OTHER; note = "2'-O-Methyl nucleoside"
  modified_base 9: mod_base = OTHER; note = "2'-O-Methyl nucleoside"
  modified_base 13: mod_base = OTHER; note = "2'-O-Methyl nucleoside"
  modified_base 15: mod_base = OTHER; note = "2'-O-Methyl nucleoside"
  modified_base 17: mod_base = OTHER; note = "2'-O-Methyl nucleoside"
  modified_base 19: mod_base = OTHER; note = "2'-O-Methyl nucleoside"
  modified_base 21: mod_base = OTHER; note = "2'-O-Methyl nucleoside"
  modified_base 23: mod_base = OTHER; note = "inverted nucleotide"
  modified_base 1: mod_base = OTHER; note = "Chol-C6 modified nucleoside"
  modified_base 23: mod_base = OTHER; note = thymine
  source 1..23: mol_type = other RNA
tatacctctgcctaatcatctat

SEQ ID NO: 476 - RNA, 23 nt, synthetic construct
  modified_base 23: mod_base = OTHER; note = thymine
  misc_feature 1..23: note = HBV RNAi trigger sense strand
  modified_base 2: mod_base = OTHER; note = "2'-hydroxy nucleoside"
  modified_base 4: mod_base = OTHER; note = "2'-deoxy-3'-fluoro nucleoside"
  modified_base 6: mod_base = OTHER; note = "2'-deoxy-3'-fluoro nucleoside"
  modified_base 8: mod_base = OTHER; note = "2'-deoxy-3'-fluoro nucleoside"
  modified_base 10..12: mod_base = OTHER; note = "2'-deoxy-3'-fluoro nucleoside"
  modified_base 14: mod_base = OTHER; note = "2'-deoxy-3'-fluoro nucleoside"
  modified_base 16: mod_base = OTHER; note = "2'-deoxy-3'-fluoro nucleoside"
  modified_base 18: mod_base = OTHER; note = "2'-deoxy-3'-fluoro nucleoside"
  modified_base 20: mod_base = OTHER; note = "2'-deoxy-3'-fluoro nucleoside"
  modified_base 22: mod_base = OTHER; note = "2'-deoxy-3'-fluoro nucleoside"
  modified_base 1: mod_base = OTHER; note = "2'-O-Methyl nucleoside"
  modified_base 3: mod_base = OTHER; note = "2'-O-Methyl nucleoside"
  modified_base 5: mod_base = OTHER; note = "2'-O-Methyl nucleoside"
  modified_base 7: mod_base = OTHER; note = "2'-O-Methyl nucleoside"
  modified_base 9: mod_base = OTHER; note = "2'-O-Methyl nucleoside"
  modified_base 13: mod_base = OTHER; note = "2'-O-Methyl nucleoside"
  modified_base 15: mod_base = OTHER; note = "2'-O-Methyl nucleoside"
  modified_base 17: mod_base = OTHER; note = "2'-O-Methyl nucleoside"
  modified_base 19: mod_base = OTHER; note = "2'-O-Methyl nucleoside"
  modified_base 21: mod_base = OTHER; note = "2'-O-Methyl nucleoside"
  modified_base 23: mod_base = OTHER; note = "inverted nucleotide"
  modified_base 1: mod_base = OTHER; note = "Chol-C6 modified nucleoside"
  modified_base 23: mod_base = OTHER; note = thymine
  source 1..23: mol_type = other RNA
tattttactagtgccatttgtat

SEQ ID NO: 477 - RNA, 23 nt, synthetic construct
  modified_base 23: mod_base = OTHER; note = thymine
  misc_feature 1..23: note = HBV RNAi trigger sense strand
  modified_base 2: mod_base = OTHER; note = "2'-hydroxy nucleoside"
  modified_base 4: mod_base = OTHER; note = "2'-deoxy-3'-fluoro nucleoside"
  modified_base 6: mod_base = OTHER; note = "2'-deoxy-3'-fluoro nucleoside"
  modified_base 8: mod_base = OTHER; note = "2'-deoxy-3'-fluoro nucleoside"
  modified_base 10..12: mod_base = OTHER; note = "2'-deoxy-3'-fluoro nucleoside"
  modified_base 14: mod_base = OTHER; note = "2'-deoxy-3'-fluoro nucleoside"
  modified_base 16: mod_base = OTHER; note = "2'-deoxy-3'-fluoro nucleoside"
  modified_base 18: mod_base = OTHER; note = "2'-deoxy-3'-fluoro nucleoside"
  modified_base 20: mod_base = OTHER; note = "2'-deoxy-3'-fluoro nucleoside"
  modified_base 22: mod_base = OTHER; note = "2'-deoxy-3'-fluoro nucleoside"
  modified_base 1: mod_base = OTHER; note = "2'-O-Methyl nucleoside"
  modified_base 3: mod_base = OTHER; note = "2'-O-Methyl nucleoside"
  modified_base 5: mod_base = OTHER; note = "2'-O-Methyl nucleoside"
  modified_base 7: mod_base = OTHER; note = "2'-O-Methyl nucleoside"
  modified_base 9: mod_base = OTHER; note = "2'-O-Methyl nucleoside"
  modified_base 13: mod_base = OTHER; note = "2'-O-Methyl nucleoside"
  modified_base 15: mod_base = OTHER; note = "2'-O-Methyl nucleoside"
  modified_base 17: mod_base = OTHER; note = "2'-O-Methyl nucleoside"
  modified_base 19: mod_base = OTHER; note = "2'-O-Methyl nucleoside"
  modified_base 21: mod_base = OTHER; note = "2'-O-Methyl nucleoside"
  modified_base 23: mod_base = OTHER; note = "inverted nucleotide"
  modified_base 1: mod_base = OTHER; note = "Chol-C6 modified nucleoside"
  modified_base 23: mod_base = OTHER; note = thymine
  source 1..23: mol_type = other RNA
tattctgcggcgttttatcatat

SEQ ID NO: 478 - RNA, 26 nt, synthetic construct
  misc_feature 1..26: note = HBV RNAi trigger sense strand
  modified_base 2: mod_base = OTHER; note = "2'-hydroxy nucleoside"
  modified_base 4: mod_base = OTHER; note = "2'-hydroxy nucleoside"
  modified_base 6: mod_base = OTHER; note = "2'-deoxy-3'-fluoro nucleoside"
  modified_base 8: mod_base = OTHER; note = "2'-deoxy-3'-fluoro nucleoside"
  modified_base 10: mod_base = OTHER; note = "2'-deoxy-3'-fluoro nucleoside"
  modified_base 12: mod_base = OTHER; note = "2'-deoxy-3'-fluoro nucleoside"
  modified_base 15..16: mod_base = OTHER; note = "2'-deoxy-3'-fluoro nucleoside"
  modified_base 18: mod_base = OTHER; note = "2'-deoxy-3'-fluoro nucleoside"
  modified_base 20: mod_base = OTHER; note = "2'-deoxy-3'-fluoro nucleoside"
  modified_base 22: mod_base = OTHER; note = "2'-deoxy-3'-fluoro nucleoside"
  modified_base 24: mod_base = OTHER; note = "2'-deoxy-3'-fluoro nucleoside"
  modified_base 26: mod_base = OTHER; note = "2'-deoxy-3'-fluoro nucleoside"
  modified_base 1: mod_base = OTHER; note = "2'-O-Methyl nucleoside"
  modified_base 3: mod_base = OTHER; note = "2'-O-Methyl nucleoside"
  modified_base 5: mod_base = OTHER; note = "2'-O-Methyl nucleoside"
  modified_base 7: mod_base = OTHER; note = "2'-O-Methyl nucleoside"
  modified_base 9: mod_base = OTHER; note = "2'-O-Methyl nucleoside"
  modified_base 11: mod_base = OTHER; note = "2'-O-Methyl nucleoside"
  modified_base 13..14: mod_base = OTHER; note = "2'-O-Methyl nucleoside"
  modified_base 17: mod_base = OTHER; note = "2'-O-Methyl nucleoside"
  modified_base 19: mod_base = OTHER; note = "2'-O-Methyl nucleoside"
  modified_base 21: mod_base = OTHER; note = "2'-O-Methyl nucleoside"
  modified_base 23: mod_base = OTHER; note = "2'-O-Methyl nucleoside"
  modified_base 25: mod_base = OTHER; note = "2'-O-Methyl nucleoside"
  modified_base 6..7: mod_base = OTHER; note = "phosphorothioate linked nucleoside"
  modified_base 25..26: mod_base = OTHER; note = "phosphorothioate linked nucleoside"
  modified_base 1: mod_base = OTHER; note = "Chol-TEG modifed nucleoside"
  source 1..26: mol_type = other RNA
tatatgcctgtaggcataaattggta

SEQ ID NO: 479 - RNA, 26 nt, synthetic construct
  misc_feature 1..26: note = HBV RNAi trigger sense strand
  modified_base 2: mod_base = OTHER; note = "2'-hydroxy nucleoside"
  modified_base 4: mod_base = OTHER; note = "2'-hydroxy nucleoside"
  modified_base 6: mod_base = OTHER; note = "2'-deoxy-3'-fluoro nucleoside"
  modified_base 8: mod_base = OTHER; note = "2'-deoxy-3'-fluoro nucleoside"
  modified_base 10: mod_base = OTHER; note = "2'-deoxy-3'-fluoro nucleoside"
  modified_base 12: mod_base = OTHER; note = "2'-deoxy-3'-fluoro nucleoside"
  modified_base 15..16: mod_base = OTHER; note = "2'-deoxy-3'-fluoro nucleoside"
  modified_base 18: mod_base = OTHER; note = "2'-deoxy-3'-fluoro nucleoside"
  modified_base 20: mod_base = OTHER; note = "2'-deoxy-3'-fluoro nucleoside"
  modified_base 22: mod_base = OTHER; note = "2'-deoxy-3'-fluoro nucleoside"
  modified_base 24: mod_base = OTHER; note = "2'-deoxy-3'-fluoro nucleoside"
  modified_base 1: mod_base = OTHER; note = "2'-O-Methyl nucleoside"
  modified_base 3: mod_base = OTHER; note = "2'-O-Methyl nucleoside"
  modified_base 5: mod_base = OTHER; note = "2'-O-Methyl nucleoside"
  modified_base 7: mod_base = OTHER; note = "2'-O-Methyl nucleoside"
  modified_base 9: mod_base = OTHER; note = "2'-O-Methyl nucleoside"
  modified_base 11: mod_base = OTHER; note = "2'-O-Methyl nucleoside"
  modified_base 13..14: mod_base = OTHER; note = "2'-O-Methyl nucleoside"
  modified_base 17: mod_base = OTHER; note = "2'-O-Methyl nucleoside"
  modified_base 19: mod_base = OTHER; note = "2'-O-Methyl nucleoside"
  modified_base 21: mod_base = OTHER; note = "2'-O-Methyl nucleoside"
  modified_base 23: mod_base = OTHER; note = "2'-O-Methyl nucleoside"
  modified_base 25: mod_base = OTHER; note = "2'-O-Methyl nucleoside"
  modified_base 26: mod_base = OTHER; note = "inverted nucleotide"
  modified_base 1: mod_base = OTHER; note = "Chol-TEG modifed nucleoside"
  source 1..26: mol_type = other RNA
tatatgcctgtaggcataaattggta

SEQ ID NO: 480 - RNA, 26 nt, synthetic construct
  misc_feature 1..26: note = HBV RNAi trigger sense strand
  modified_base 2: mod_base = OTHER; note = "2'-hydroxy nucleoside"
  modified_base 4: mod_base = OTHER; note = "2'-hydroxy nucleoside"
  modified_base 6: mod_base = OTHER; note = "2'-deoxy-3'-fluoro nucleoside"
  modified_base 8: mod_base = OTHER; note = "2'-deoxy-3'-fluoro nucleoside"
  modified_base 10: mod_base = OTHER; note = "2'-deoxy-3'-fluoro nucleoside"
  modified_base 12..13: mod_base = OTHER; note = "2'-deoxy-3'-fluoro nucleoside"
  modified_base 15..16: mod_base = OTHER; note = "2'-deoxy-3'-fluoro nucleoside"
  modified_base 18: mod_base = OTHER; note = "2'-deoxy-3'-fluoro nucleoside"
  modified_base 20: mod_base = OTHER; note = "2'-deoxy-3'-fluoro nucleoside"
  modified_base 22: mod_base = OTHER; note = "2'-deoxy-3'-fluoro nucleoside"
  modified_base 24: mod_base = OTHER; note = "2'-deoxy-3'-fluoro nucleoside"
  modified_base 26: mod_base = OTHER; note = "2'-deoxy-3'-fluoro nucleoside"
  modified_base 1: mod_base = OTHER; note = "2'-O-Methyl nucleoside"
  modified_base 3: mod_base = OTHER; note = "2'-O-Methyl nucleoside"
  modified_base 5: mod_base = OTHER; note = "2'-O-Methyl nucleoside"
  modified_base 7: mod_base = OTHER; note = "2'-O-Methyl nucleoside"
  modified_base 9: mod_base = OTHER; note = "2'-O-Methyl nucleoside"
  modified_base 11: mod_base = OTHER; note = "2'-O-Methyl nucleoside"
  modified_base 14: mod_base = OTHER; note = "2'-O-Methyl nucleoside"
  modified_base 17: mod_base = OTHER; note = "2'-O-Methyl nucleoside"
  modified_base 19: mod_base = OTHER; note = "2'-O-Methyl nucleoside"
  modified_base 21: mod_base = OTHER; note = "2'-O-Methyl nucleoside"
  modified_base 23: mod_base = OTHER; note = "2'-O-Methyl nucleoside"
  modified_base 25: mod_base = OTHER; note = "2'-O-Methyl nucleoside"
  modified_base 6..7: mod_base = OTHER; note = "phosphorothioate linked nucleoside"
  modified_base 25..26: mod_base = OTHER; note = "phosphorothioate linked nucleoside"
  modified_base 1: mod_base = OTHER; note = "Chol-TEG modifed nucleoside"
  source 1..26: mol_type = other RNA
tatatgcctgtaggcataaattggta

SEQ ID NO: 481 - RNA, 26 nt, synthetic construct
  misc_feature 1..26: note = HBV RNAi trigger sense strand
  modified_base 2: mod_base = OTHER; note = "2'-hydroxy nucleoside"
  modified_base 4: mod_base = OTHER; note = "2'-hydroxy nucleoside"
  modified_base 6: mod_base = OTHER; note = "2'-deoxy-3'-fluoro nucleoside"
  modified_base 8: mod_base = OTHER; note = "2'-deoxy-3'-fluoro nucleoside"
  modified_base 10: mod_base = OTHER; note = "2'-deoxy-3'-fluoro nucleoside"
  modified_base 12..13: mod_base = OTHER; note = "2'-deoxy-3'-fluoro nucleoside"
  modified_base 15..16: mod_base = OTHER; note = "2'-deoxy-3'-fluoro nucleoside"
  modified_base 18: mod_base = OTHER; note = "2'-deoxy-3'-fluoro nucleoside"
  modified_base 20: mod_base = OTHER; note = "2'-deoxy-3'-fluoro nucleoside"
  modified_base 22: mod_base = OTHER; note = "2'-deoxy-3'-fluoro nucleoside"
  modified_base 24: mod_base = OTHER; note = "2'-deoxy-3'-fluoro nucleoside"
  modified_base 1: mod_base = OTHER; note = "2'-O-Methyl nucleoside"
  modified_base 3: mod_base = OTHER; note = "2'-O-Methyl nucleoside"
  modified_base 5: mod_base = OTHER; note = "2'-O-Methyl nucleoside"
  modified_base 7: mod_base = OTHER; note = "2'-O-Methyl nucleoside"
  modified_base 9: mod_base = OTHER; note = "2'-O-Methyl nucleoside"
  modified_base 11: mod_base = OTHER; note = "2'-O-Methyl nucleoside"
  modified_base 14: mod_base = OTHER; note = "2'-O-Methyl nucleoside"
  modified_base 17: mod_base = OTHER; note = "2'-O-Methyl nucleoside"
  modified_base 19: mod_base = OTHER; note = "2'-O-Methyl nucleoside"
  modified_base 21: mod_base = OTHER; note = "2'-O-Methyl nucleoside"
  modified_base 23: mod_base = OTHER; note = "2'-O-Methyl nucleoside"
  modified_base 25: mod_base = OTHER; note = "2'-O-Methyl nucleoside"
  modified_base 26: mod_base = OTHER; note = "inverted nucleotide"
  modified_base 1: mod_base = OTHER; note = "Chol-TEG modifed nucleoside"
  source 1..26: mol_type = other RNA
tatatgcctgtaggcataaattggta

SEQ ID NO: 482 - RNA, 26 nt, synthetic construct
  misc_feature 1..26: note = HBV RNAi trigger sense strand
  modified_base 2: mod_base = OTHER; note = "2'-hydroxy nucleoside"
  modified_base 4: mod_base = OTHER; note = "2'-hydroxy nucleoside"
  modified_base 6: mod_base = OTHER; note = "2'-deoxy-3'-fluoro nucleoside"
  modified_base 8: mod_base = OTHER; note = "2'-deoxy-3'-fluoro nucleoside"
  modified_base 10: mod_base = OTHER; note = "2'-deoxy-3'-fluoro nucleoside"
  modified_base 12: mod_base = OTHER; note = "2'-deoxy-3'-fluoro nucleoside"
  modified_base 15..16: mod_base = OTHER; note = "2'-deoxy-3'-fluoro nucleoside"
  modified_base 18: mod_base = OTHER; note = "2'-deoxy-3'-fluoro nucleoside"
  modified_base 20: mod_base = OTHER; note = "2'-deoxy-3'-fluoro nucleoside"
  modified_base 22: mod_base = OTHER; note = "2'-deoxy-3'-fluoro nucleoside"
  modified_base 24: mod_base = OTHER; note = "2'-deoxy-3'-fluoro nucleoside"
  modified_base 26: mod_base = OTHER; note = "2'-deoxy-3'-fluoro nucleoside"
  modified_base 1: mod_base = OTHER; note = "2'-O-Methyl nucleoside"
  modified_base 3: mod_base = OTHER; note = "2'-O-Methyl nucleoside"
  modified_base 5: mod_base = OTHER; note = "2'-O-Methyl nucleoside"
  modified_base 7: mod_base = OTHER; note = "2'-O-Methyl nucleoside"
  modified_base 9: mod_base = OTHER; note = "2'-O-Methyl nucleoside"
  modified_base 11: mod_base = OTHER; note = "2'-O-Methyl nucleoside"
  modified_base 13..14: mod_base = OTHER; note = "2'-O-Methyl nucleoside"
  modified_base 17: mod_base = OTHER; note = "2'-O-Methyl nucleoside"
  modified_base 19: mod_base = OTHER; note = "2'-O-Methyl nucleoside"
  modified_base 21: mod_base = OTHER; note = "2'-O-Methyl nucleoside"
  modified_base 23: mod_base = OTHER; note = "2'-O-Methyl nucleoside"
  modified_base 25: mod_base = OTHER; note = "2'-O-Methyl nucleoside"
  modified_base 6..7: mod_base = OTHER; note = "phosphorothioate linked nucleoside"
  modified_base 25..26: mod_base = OTHER; note = "phosphorothioate linked nucleoside"
  modified_base 1: mod_base = OTHER; note = "Chol-TEG modifed nucleoside"
  source 1..26: mol_type = other RNA
tatattgtctgcggcgttttatcata

SEQ ID NO: 483 - RNA, 26 nt, synthetic construct
  misc_feature 1..26: note = HBV RNAi trigger sense strand
  modified_base 2: mod_base = OTHER; note = "2'-hydroxy nucleoside"
  modified_base 4: mod_base = OTHER; note = "2'-hydroxy nucleoside"
  modified_base 6: mod_base = OTHER; note = "2'-deoxy-3'-fluoro nucleoside"
  modified_base 8: mod_base = OTHER; note = "2'-deoxy-3'-fluoro nucleoside"
  modified_base 10: mod_base = OTHER; note = "2'-deoxy-3'-fluoro nucleoside"
  modified_base 12: mod_base = OTHER; note = "2'-deoxy-3'-fluoro nucleoside"
  modified_base 15..16: mod_base = OTHER; note = "2'-deoxy-3'-fluoro nucleoside"
  modified_base 18: mod_base = OTHER; note = "2'-deoxy-3'-fluoro nucleoside"
  modified_base 20: mod_base = OTHER; note = "2'-deoxy-3'-fluoro nucleoside"
  modified_base 22: mod_base = OTHER; note = "2'-deoxy-3'-fluoro nucleoside"
  modified_base 24: mod_base = OTHER; note = "2'-deoxy-3'-fluoro nucleoside"
  modified_base 1: mod_base = OTHER; note = "2'-O-Methyl nucleoside"
  modified_base 3: mod_base = OTHER; note = "2'-O-Methyl nucleoside"
  modified_base 5: mod_base = OTHER; note = "2'-O-Methyl nucleoside"
  modified_base 7: mod_base = OTHER; note = "2'-O-Methyl nucleoside"
  modified_base 9: mod_base = OTHER; note = "2'-O-Methyl nucleoside"
  modified_base 11: mod_base = OTHER; note = "2'-O-Methyl nucleoside"
  modified_base 13..14: mod_base = OTHER; note = "2'-O-Methyl nucleoside"
  modified_base 17: mod_base = OTHER; note = "2'-O-Methyl nucleoside"
  modified_base 19: mod_base = OTHER; note = "2'-O-Methyl nucleoside"
  modified_base 21: mod_base = OTHER; note = "2'-O-Methyl nucleoside"
  modified_base 23: mod_base = OTHER; note = "2'-O-Methyl nucleoside"
  modified_base 25: mod_base = OTHER; note = "2'-O-Methyl nucleoside"
  modified_base 26: mod_base = OTHER; note = "inverted nucleotide"
  modified_base 1: mod_base = OTHER; note = "Chol-TEG modifed nucleoside"
  source 1..26: mol_type = other RNA
tatattgtctgcggcgttttatcata

SEQ ID NO: 484 - RNA, 26 nt, synthetic construct
  misc_feature 1..26: note = HBV RNAi trigger sense strand
  modified_base 2: mod_base = OTHER; note = "2'-hydroxy nucleoside"
  modified_base 4: mod_base = OTHER; note = "2'-hydroxy nucleoside"
  modified_base 6: mod_base = OTHER; note = "2'-deoxy-3'-fluoro nucleoside"
  modified_base 8: mod_base = OTHER; note = "2'-deoxy-3'-fluoro nucleoside"
  modified_base 10: mod_base = OTHER; note = "2'-deoxy-3'-fluoro nucleoside"
  modified_base 12..13: mod_base = OTHER; note = "2'-deoxy-3'-fluoro nucleoside"
  modified_base 15..16: mod_base = OTHER; note = "2'-deoxy-3'-fluoro nucleoside"
  modified_base 18: mod_base = OTHER; note = "2'-deoxy-3'-fluoro nucleoside"
  modified_base 20: mod_base = OTHER; note = "2'-deoxy-3'-fluoro nucleoside"
  modified_base 22: mod_base = OTHER; note = "2'-deoxy-3'-fluoro nucleoside"
  modified_base 24: mod_base = OTHER; note = "2'-deoxy-3'-fluoro nucleoside"
  modified_base 26: mod_base = OTHER; note = "2'-deoxy-3'-fluoro nucleoside"
  modified_base 1: mod_base = OTHER; note = "2'-O-Methyl nucleoside"
  modified_base 3: mod_base = OTHER; note = "2'-O-Methyl nucleoside"
  modified_base 5: mod_base = OTHER; note = "2'-O-Methyl nucleoside"
  modified_base 7: mod_base = OTHER; note = "2'-O-Methyl nucleoside"
  modified_base 9: mod_base = OTHER; note = "2'-O-Methyl nucleoside"
  modified_base 11: mod_base = OTHER; note = "2'-O-Methyl nucleoside"
  modified_base 14: mod_base = OTHER; note = "2'-O-Methyl nucleoside"
  modified_base 17: mod_base = OTHER; note = "2'-O-Methyl nucleoside"
  modified_base 19: mod_base = OTHER; note = "2'-O-Methyl nucleoside"
  modified_base 21: mod_base = OTHER; note = "2'-O-Methyl nucleoside"
  modified_base 23: mod_base = OTHER; note = "2'-O-Methyl nucleoside"
  modified_base 25: mod_base = OTHER; note = "2'-O-Methyl nucleoside"
  modified_base 6..7: mod_base = OTHER; note = "phosphorothioate linked nucleoside"
  modified_base 25..26: mod_base = OTHER; note = "phosphorothioate linked nucleoside"
  modified_base 1: mod_base = OTHER; note = "Chol-TEG modifed nucleoside"
  source 1..26: mol_type = other RNA
tatattgtctgcggcgttttatcata

SEQ ID NO: 485 - RNA, 26 nt, synthetic construct
  misc_feature 1..26: note = HBV RNAi trigger sense strand
  modified_base 2: mod_base = OTHER; note = "2'-hydroxy nucleoside"
  modified_base 4: mod_base = OTHER; note = "2'-hydroxy nucleoside"
  modified_base 6: mod_base = OTHER; note = "2'-deoxy-3'-fluoro nucleoside"
  modified_base 8: mod_base = OTHER; note = "2'-deoxy-3'-fluoro nucleoside"
  modified_base 10: mod_base = OTHER; note = "2'-deoxy-3'-fluoro nucleoside"
  modified_base 12..13: mod_base = OTHER; note = "2'-deoxy-3'-fluoro nucleoside"
  modified_base 15..16: mod_base = OTHER; note = "2'-deoxy-3'-fluoro nucleoside"
  modified_base 18: mod_base = OTHER; note = "2'-deoxy-3'-fluoro nucleoside"
  modified_base 20: mod_base = OTHER; note = "2'-deoxy-3'-fluoro nucleoside"
  modified_base 22: mod_base = OTHER; note = "2'-deoxy-3'-fluoro nucleoside"
  modified_base 24: mod_base = OTHER; note = "2'-deoxy-3'-fluoro nucleoside"
  modified_base 1: mod_base = OTHER; note = "2'-O-Methyl nucleoside"
  modified_base 3: mod_base = OTHER; note = "2'-O-Methyl nucleoside"
  modified_base 5: mod_base = OTHER; note = "2'-O-Methyl nucleoside"
  modified_base 7: mod_base = OTHER; note = "2'-O-Methyl nucleoside"
  modified_base 9: mod_base = OTHER; note = "2'-O-Methyl nucleoside"
  modified_base 11: mod_base = OTHER; note = "2'-O-Methyl nucleoside"
  modified_base 14: mod_base = OTHER; note = "2'-O-Methyl nucleoside"
  modified_base 17: mod_base = OTHER; note = "2'-O-Methyl nucleoside"
  modified_base 19: mod_base = OTHER; note = "2'-O-Methyl nucleoside"
  modified_base 21: mod_base = OTHER; note = "2'-O-Methyl nucleoside"
  modified_base 23: mod_base = OTHER; note = "2'-O-Methyl nucleoside"
  modified_base 25: mod_base = OTHER; note = "2'-O-Methyl nucleoside"
  modified_base 26: mod_base = OTHER; note = "inverted nucleotide"
  modified_base 1: mod_base = OTHER; note = "Chol-TEG modifed nucleoside"
  source 1..26: mol_type = other RNA
tatattgtctgcggcgttttatcata

SEQ ID NO: 486 - RNA, 26 nt, synthetic construct
  misc_feature 1..26: note = HBV RNAi trigger sense strand
  modified_base 2: mod_base = OTHER; note = "2'-hydroxy nucleoside"
  modified_base 4: mod_base = OTHER; note = "2'-hydroxy nucleoside"
  modified_base 6: mod_base = OTHER; note = "2'-deoxy-3'-fluoro nucleoside"
  modified_base 8: mod_base = OTHER; note = "2'-deoxy-3'-fluoro nucleoside"
  modified_base 10: mod_base = OTHER; note = "2'-deoxy-3'-fluoro nucleoside"
  modified_base 12: mod_base = OTHER; note = "2'-deoxy-3'-fluoro nucleoside"
  modified_base 15..16: mod_base = OTHER; note = "2'-deoxy-3'-fluoro nucleoside"
  modified_base 18: mod_base = OTHER; note = "2'-deoxy-3'-fluoro nucleoside"
  modified_base 20: mod_base = OTHER; note = "2'-deoxy-3'-fluoro nucleoside"
  modified_base 22: mod_base = OTHER; note = "2'-deoxy-3'-fluoro nucleoside"
  modified_base 24: mod_base = OTHER; note = "2'-deoxy-3'-fluoro nucleoside"
  modified_base 26: mod_base = OTHER; note = "2'-deoxy-3'-fluoro nucleoside"
  modified_base 1: mod_base = OTHER; note = "2'-O-Methyl nucleoside"
  modified_base 3: mod_base = OTHER; note = "2'-O-Methyl nucleoside"
  modified_base 5: mod_base = OTHER; note = "2'-O-Methyl nucleoside"
  modified_base 7: mod_base = OTHER; note = "2'-O-Methyl nucleoside"
  modified_base 9: mod_base = OTHER; note = "2'-O-Methyl nucleoside"
  modified_base 11: mod_base = OTHER; note = "2'-O-Methyl nucleoside"
  modified_base 13..14: mod_base = OTHER; note = "2'-O-Methyl nucleoside"
  modified_base 17: mod_base = OTHER; note = "2'-O-Methyl nucleoside"
  modified_base 19: mod_base = OTHER; note = "2'-O-Methyl nucleoside"
  modified_base 21: mod_base = OTHER; note = "2'-O-Methyl nucleoside"
  modified_base 23: mod_base = OTHER; note = "2'-O-Methyl nucleoside"
  modified_base 25: mod_base = OTHER; note = "2'-O-Methyl nucleoside"
  modified_base 6..7: mod_base = OTHER; note = "phosphorothioate linked nucleoside"
  modified_base 25..26: mod_base = OTHER; note = "phosphorothioate linked nucleoside"
  modified_base 1: mod_base = OTHER; note = "Chol-TEG modifed nucleoside"
  source 1..26: mol_type = other RNA
tatatcaacctctgcctaatcatcta

SEQ ID NO: 487 - RNA, 26 nt, synthetic construct
  misc_feature 1..26: note = HBV RNAi trigger sense strand
  modified_base 2: mod_base = OTHER; note = "2'-hydroxy nucleoside"
  modified_base 4: mod_base = OTHER; note = "2'-hydroxy nucleoside"
  modified_base 6: mod_base = OTHER; note = "2'-deoxy-3'-fluoro nucleoside"
  modified_base 8: mod_base = OTHER; note = "2'-deoxy-3'-fluoro nucleoside"
  modified_base 10: mod_base = OTHER; note = "2'-deoxy-3'-fluoro nucleoside"
  modified_base 12: mod_base = OTHER; note = "2'-deoxy-3'-fluoro nucleoside"
  modified_base 15..16: mod_base = OTHER; note = "2'-deoxy-3'-fluoro nucleoside"
  modified_base 18: mod_base = OTHER; note = "2'-deoxy-3'-fluoro nucleoside"
  modified_base 20: mod_base = OTHER; note = "2'-deoxy-3'-fluoro nucleoside"
  modified_base 22: mod_base = OTHER; note = "2'-deoxy-3'-fluoro nucleoside"
  modified_base 24: mod_base = OTHER; note = "2'-deoxy-3'-fluoro nucleoside"
  modified_base 1: mod_base = OTHER; note = "2'-O-Methyl nucleoside"
  modified_base 3: mod_base = OTHER; note = "2'-O-Methyl nucleoside"
  modified_base 5: mod_base = OTHER; note = "2'-O-Methyl nucleoside"
  modified_base 7: mod_base = OTHER; note = "2'-O-Methyl nucleoside"
  modified_base 9: mod_base = OTHER; note = "2'-O-Methyl nucleoside"
  modified_base 11: mod_base = OTHER; note = "2'-O-Methyl nucleoside"
  modified_base 13..14: mod_base = OTHER; note = "2'-O-Methyl nucleoside"
  modified_base 17: mod_base = OTHER; note = "2'-O-Methyl nucleoside"
  modified_base 19: mod_base = OTHER; note = "2'-O-Methyl nucleoside"
  modified_base 21: mod_base = OTHER; note = "2'-O-Methyl nucleoside"
  modified_base 23: mod_base = OTHER; note = "2'-O-Methyl nucleoside"
  modified_base 25: mod_base = OTHER; note = "2'-O-Methyl nucleoside"
  modified_base 26: mod_base = OTHER; note = "inverted nucleotide"
  modified_base 1: mod_base = OTHER; note = "Chol-TEG modifed nucleoside"
  source 1..26: mol_type = other RNA
tatatcaacctctgcctaatcatcta

SEQ ID NO: 488 - RNA, 26 nt, synthetic construct
  misc_feature 1..26: note = HBV RNAi trigger sense strand
  modified_base 2: mod_base = OTHER; note = "2'-hydroxy nucleoside"
  modified_base 4: mod_base = OTHER; note = "2'-hydroxy nucleoside"
  modified_base 6: mod_base = OTHER; note = "2'-deoxy-3'-fluoro nucleoside"
  modified_base 8: mod_base = OTHER; note = "2'-deoxy-3'-fluoro nucleoside"
  modified_base 10: mod_base = OTHER; note = "2'-deoxy-3'-fluoro nucleoside"
  modified_base 12..13: mod_base = OTHER; note = "2'-deoxy-3'-fluoro nucleoside"
  modified_base 15..16: mod_base = OTHER; note = "2'-deoxy-3'-fluoro nucleoside"
  modified_base 18: mod_base = OTHER; note = "2'-deoxy-3'-fluoro nucleoside"
  modified_base 20: mod_base = OTHER; note = "2'-deoxy-3'-fluoro nucleoside"
  modified_base 22: mod_base = OTHER; note = "2'-deoxy-3'-fluoro nucleoside"
  modified_base 24: mod_base = OTHER; note = "2'-deoxy-3'-fluoro nucleoside"
  modified_base 26: mod_base = OTHER; note = "2'-deoxy-3'-fluoro nucleoside"
  modified_base 1: mod_base = OTHER; note = "2'-O-Methyl nucleoside"
  modified_base 3: mod_base = OTHER; note = "2'-O-Methyl nucleoside"
  modified_base 5: mod_base = OTHER; note = "2'-O-Methyl nucleoside"
  modified_base 7: mod_base = OTHER; note = "2'-O-Methyl nucleoside"
  modified_base 9: mod_base = OTHER; note = "2'-O-Methyl nucleoside"
  modified_base 11: mod_base = OTHER; note = "2'-O-Methyl nucleoside"
  modified_base 14: mod_base = OTHER; note = "2'-O-Methyl nucleoside"
  modified_base 17: mod_base = OTHER; note = "2'-O-Methyl nucleoside"
  modified_base 19: mod_base = OTHER; note = "2'-O-Methyl nucleoside"
  modified_base 21: mod_base = OTHER; note = "2'-O-Methyl nucleoside"
  modified_base 23: mod_base = OTHER; note = "2'-O-Methyl nucleoside"
  modified_base 25: mod_base = OTHER; note = "2'-O-Methyl nucleoside"
  modified_base 6..7: mod_base = OTHER; note = "phosphorothioate linked nucleoside"
  modified_base 25..26: mod_base = OTHER; note = "phosphorothioate linked nucleoside"
  modified_base 1: mod_base = OTHER; note = "Chol-TEG modifed nucleoside"
  source 1..26: mol_type = other RNA
tatatcaacctctgcctaatcatcta

SEQ ID NO: 489 - RNA, 26 nt, synthetic construct
  misc_feature 1..26: note = HBV RNAi trigger sense strand
  modified_base 2: mod_base = OTHER; note = "2'-hydroxy nucleoside"
  modified_base 4: mod_base = OTHER; note = "2'-hydroxy nucleoside"
  modified_base 6: mod_base = OTHER; note = "2'-deoxy-3'-fluoro nucleoside"
  modified_base 8: mod_base = OTHER; note = "2'-deoxy-3'-fluoro nucleoside"
  modified_base 10: mod_base = OTHER; note = "2'-deoxy-3'-fluoro nucleoside"
  modified_base 12..13: mod_base = OTHER; note = "2'-deoxy-3'-fluoro nucleoside"
  modified_base 15..16: mod_base = OTHER; note = "2'-deoxy-3'-fluoro nucleoside"
  modified_base 18: mod_base = OTHER; note = "2'-deoxy-3'-fluoro nucleoside"
  modified_base 20: mod_base = OTHER; note = "2'-deoxy-3'-fluoro nucleoside"
  modified_base 22: mod_base = OTHER; note = "2'-deoxy-3'-fluoro nucleoside"
  modified_base 24: mod_base = OTHER; note = "2'-deoxy-3'-fluoro nucleoside"
  modified_base 1: mod_base = OTHER; note = "2'-O-Methyl nucleoside"
  modified_base 3: mod_base = OTHER; note = "2'-O-Methyl nucleoside"
  modified_base 5: mod_base = OTHER; note = "2'-O-Methyl nucleoside"
  modified_base 7: mod_base = OTHER; note = "2'-O-Methyl nucleoside"
  modified_base 9: mod_base = OTHER; note = "2'-O-Methyl nucleoside"
  modified_base 11: mod_base = OTHER; note = "2'-O-Methyl nucleoside"
  modified_base 14: mod_base = OTHER; note = "2'-O-Methyl nucleoside"
  modified_base 17: mod_base = OTHER; note = "2'-O-Methyl nucleoside"
  modified_base 19: mod_base = OTHER; note = "2'-O-Methyl nucleoside"
  modified_base 21: mod_base = OTHER; note = "2'-O-Methyl nucleoside"
  modified_base 23: mod_base = OTHER; note = "2'-O-Methyl nucleoside"
  modified_base 25: mod_base = OTHER; note = "2'-O-Methyl nucleoside"
  modified_base 26: mod_base = OTHER; note = "inverted nucleotide"
  modified_base 1: mod_base = OTHER; note = "Chol-TEG modifed nucleoside"
  source 1..26: mol_type = other RNA
tatatcaacctctgcctaatcatcta

SEQ ID NO: 490 - RNA, 20 nt, synthetic construct
  modified_base 20: mod_base = OTHER; note = thymine
  misc_feature 1..20: note = HBV RNAi trigger sense strand
  modified_base 1: mod_base = OTHER; note = "2'-deoxy-3'-fluoro nucleoside"
  modified_base 3: mod_base = OTHER; note = "2'-deoxy-3'-fluoro nucleoside"
  modified_base 5: mod_base = OTHER; note = "2'-deoxy-3'-fluoro nucleoside"
  modified_base 7..9: mod_base = OTHER; note = "2'-deoxy-3'-fluoro nucleoside"
  modified_base 11: mod_base = OTHER; note = "2'-deoxy-3'-fluoro nucleoside"
  modified_base 13: mod_base = OTHER; note = "2'-deoxy-3'-fluoro nucleoside"
  modified_base 15: mod_base = OTHER; note = "2'-deoxy-3'-fluoro nucleoside"
  modified_base 17: mod_base = OTHER; note = "2'-deoxy-3'-fluoro nucleoside"
  modified_base 19: mod_base = OTHER; note = "2'-deoxy-3'-fluoro nucleoside"
  modified_base 2: mod_base = OTHER; note = "2'-O-Methyl nucleoside"
  modified_base 4: mod_base = OTHER; note = "2'-O-Methyl nucleoside"
  modified_base 6: mod_base = OTHER; note = "2'-O-Methyl nucleoside"
  modified_base 10: mod_base = OTHER; note = "2'-O-Methyl nucleoside"
  modified_base 12: mod_base = OTHER; note = "2'-O-Methyl nucleoside"
  modified_base 14: mod_base = OTHER; note = "2'-O-Methyl nucleoside"
  modified_base 16: mod_base = OTHER; note = "2'-O-Methyl nucleoside"
  modified_base 18: mod_base = OTHER; note = "2'-O-Methyl nucleoside"
  modified_base 20: mod_base = OTHER; note = "inverted nucleotide"
  modified_base 20: mod_base = OTHER; note = thymine
  source 1..20: mol_type = other RNA
tctgcggcgttttatcatat

SEQ ID NO: 491 - RNA, 20 nt, synthetic construct
  modified_base 20: mod_base = OTHER; note = thymine
  misc_feature 1..20: note = HBV RNAi trigger sense strand
  modified_base 1: mod_base = OTHER; note = "2'-deoxy-3'-fluoro nucleoside"
  modified_base 3: mod_base = OTHER; note = "2'-deoxy-3'-fluoro nucleoside"
  modified_base 5: mod_base = OTHER; note = "2'-deoxy-3'-fluoro nucleoside"
  modified_base 7: mod_base = OTHER; note = "2'-deoxy-3'-fluoro nucleoside"
  modified_base 9: mod_base = OTHER; note = "2'-deoxy-3'-fluoro nucleoside"
  modified_base 11: mod_base = OTHER; note = "2'-deoxy-3'-fluoro nucleoside"
  modified_base 13: mod_base = OTHER; note = "2'-deoxy-3'-fluoro nucleoside"
  modified_base 15: mod_base = OTHER; note = "2'-deoxy-3'-fluoro nucleoside"
  modified_base 17: mod_base = OTHER; note = "2'-deoxy-3'-fluoro nucleoside"
  modified_base 19: mod_base = OTHER; note = "2'-deoxy-3'-fluoro nucleoside"
  modified_base 2: mod_base = OTHER; note = "2'-O-Methyl nucleoside"
  modified_base 4: mod_base = OTHER; note = "2'-O-Methyl nucleoside"
  modified_base 6: mod_base = OTHER; note = "2'-O-Methyl nucleoside"
  modified_base 8: mod_base = OTHER; note = "2'-O-Methyl nucleoside"
  modified_base 10: mod_base = OTHER; note = "2'-O-Methyl nucleoside"
  modified_base 12: mod_base = OTHER; note = "2'-O-Methyl nucleoside"
  modified_base 14: mod_base = OTHER; note = "2'-O-Methyl nucleoside"
  modified_base 16: mod_base = OTHER; note = "2'-O-Methyl nucleoside"
  modified_base 18: mod_base = OTHER; note = "2'-O-Methyl nucleoside"
  modified_base 20: mod_base = OTHER; note = "inverted nucleotide"
  modified_base 20: mod_base = OTHER; note = thymine
  source 1..20: mol_type = other RNA
tctgcggcgttttatcatat

SEQ ID NO: 492 - RNA, 23 nt, synthetic construct
  modified_base 23: mod_base = OTHER; note = thymine
  misc_feature 1..23: note = HBV RNAi trigger sense strand
  modified_base 2: mod_base = OTHER; note = "2'-hydroxy nucleoside"
  modified_base 4: mod_base = OTHER; note = "2'-deoxy-3'-fluoro nucleoside"
  modified_base 6: mod_base = OTHER; note = "2'-deoxy-3'-fluoro nucleoside"
  modified_base 8: mod_base = OTHER; note = "2'-deoxy-3'-fluoro nucleoside"
  modified_base 10: mod_base = OTHER; note = "2'-deoxy-3'-fluoro nucleoside"
  modified_base 12: mod_base = OTHER; note = "2'-deoxy-3'-fluoro nucleoside"
  modified_base 14: mod_base = OTHER; note = "2'-deoxy-3'-fluoro nucleoside"
  modified_base 16: mod_base = OTHER; note = "2'-deoxy-3'-fluoro nucleoside"
  modified_base 18: mod_base = OTHER; note = "2'-deoxy-3'-fluoro nucleoside"
  modified_base 20: mod_base = OTHER; note = "2'-deoxy-3'-fluoro nucleoside"
  modified_base 22: mod_base = OTHER; note = "2'-deoxy-3'-fluoro nucleoside"
  modified_base 1: mod_base = OTHER; note = "2'-O-Methyl nucleoside"
  modified_base 3: mod_base = OTHER; note = "2'-O-Methyl nucleoside"
  modified_base 5: mod_base = OTHER; note = "2'-O-Methyl nucleoside"
  modified_base 7: mod_base = OTHER; note = "2'-O-Methyl nucleoside"
  modified_base 9: mod_base = OTHER; note = "2'-O-Methyl nucleoside"
  modified_base 11: mod_base = OTHER; note = "2'-O-Methyl nucleoside"
  modified_base 13: mod_base = OTHER; note = "2'-O-Methyl nucleoside"
  modified_base 15: mod_base = OTHER; note = "2'-O-Methyl nucleoside"
  modified_base 17: mod_base = OTHER; note = "2'-O-Methyl nucleoside"
  modified_base 19: mod_base = OTHER; note = "2'-O-Methyl nucleoside"
  modified_base 21: mod_base = OTHER; note = "2'-O-Methyl nucleoside"
  modified_base 23: mod_base = OTHER; note = "inverted nucleotide"
  modified_base 1: mod_base = OTHER; note = "Chol-C6 modified nucleoside"
  modified_base 23: mod_base = OTHER; note = thymine
  source 1..23: mol_type = other RNA
tattctgcggcgttttatcatat

SEQ ID NO: 493 - RNA, 20 nt, synthetic construct
  modified_base 20: mod_base = OTHER; note = thymine
  misc_feature 1..20: note = HBV RNAi trigger sense strand
  modified_base 1: mod_base = OTHER; note = "2'-deoxy-3'-fluoro nucleoside"
  modified_base 3: mod_base = OTHER; note = "2'-deoxy-3'-fluoro nucleoside"
  modified_base 5: mod_base = OTHER; note = "2'-deoxy-3'-fluoro nucleoside"
  modified_base 7..9: mod_base = OTHER; note = "2'-deoxy-3'-fluoro nucleoside"
  modified_base 11: mod_base = OTHER; note = "2'-deoxy-3'-fluoro nucleoside"
  modified_base 13: mod_base = OTHER; note = "2'-deoxy-3'-fluoro nucleoside"
  modified_base 15: mod_base = OTHER; note = "2'-deoxy-3'-fluoro nucleoside"
  modified_base 17: mod_base = OTHER; note = "2'-deoxy-3'-fluoro nucleoside"
  modified_base 19: mod_base = OTHER; note = "2'-deoxy-3'-fluoro nucleoside"
  modified_base 2: mod_base = OTHER; note = "2'-O-Methyl nucleoside"
  modified_base 4: mod_base = OTHER; note = "2'-O-Methyl nucleoside"
  modified_base 6: mod_base = OTHER; note = "2'-O-Methyl nucleoside"
  modified_base 8: mod_base = OTHER; note = "2'-O-Methyl nucleoside"
  modified_base 10: mod_base = OTHER; note = "2'-O-Methyl nucleoside"
  modified_base 12: mod_base = OTHER; note = "2'-O-Methyl nucleoside"
  modified_base 14: mod_base = OTHER; note = "2'-O-Methyl nucleoside"
  modified_base 16: mod_base = OTHER; note = "2'-O-Methyl nucleoside"
  modified_base 18: mod_base = OTHER; note = "2'-O-Methyl nucleoside"
  modified_base 20: mod_base = OTHER; note = "inverted nucleotide"
  modified_base 20: mod_base = OTHER; note = thymine
  source 1..20: mol_type = other RNA
ctgtaggcataaattggtat

SEQ ID NO: 494 - RNA, 20 nt, synthetic construct
  modified_base 20: mod_base = OTHER; note = thymine
  misc_feature 1..20: note = HBV RNAi trigger sense strand
  modified_base 1: mod_base = OTHER; note = "2'-deoxy-3'-fluoro nucleoside"
  modified_base 3: mod_base = OTHER; note = "2'-deoxy-3'-fluoro nucleoside"
  modified_base 5: mod_base = OTHER; note = "2'-deoxy-3'-fluoro nucleoside"
  modified_base 7..9: mod_base = OTHER; note = "2'-deoxy-3'-fluoro nucleoside"
  modified_base 11: mod_base = OTHER; note = "2'-deoxy-3'-fluoro nucleoside"
  modified_base 13: mod_base = OTHER; note = "2'-deoxy-3'-fluoro nucleoside"
  modified_base 15: mod_base = OTHER; note = "2'-deoxy-3'-fluoro nucleoside"
  modified_base 17: mod_base = OTHER; note = "2'-deoxy-3'-fluoro nucleoside"
  modified_base 19: mod_base = OTHER; note = "2'-deoxy-3'-fluoro nucleoside"
  modified_base 2: mod_base = OTHER; note = "2'-O-Methyl nucleoside"
  modified_base 4: mod_base = OTHER; note = "2'-O-Methyl nucleoside"
  modified_base 6: mod_base = OTHER; note = "2'-O-Methyl nucleoside"
  modified_base 8: mod_base = OTHER; note = "2'-O-Methyl nucleoside"
  modified_base 10: mod_base = OTHER; note = "2'-O-Methyl nucleoside"
  modified_base 12: mod_base = OTHER; note = "2'-O-Methyl nucleoside"
  modified_base 14: mod_base = OTHER; note = "2'-O-Methyl nucleoside"
  modified_base 16: mod_base = OTHER; note = "2'-O-Methyl nucleoside"
  modified_base 18: mod_base = OTHER; note = "2'-O-Methyl nucleoside"
  modified_base 20: mod_base = OTHER; note = "inverted nucleotide"
  modified_base 20: mod_base = OTHER; note = thymine
  source 1..20: mol_type = other RNA
acctctgcctaatcatctat

SEQ ID NO: 495 - RNA, 26 nt, synthetic construct
  misc_feature 1..26: note = HBV RNAi trigger sense strand
  modified_base 2: mod_base = OTHER; note = "2'-hydroxy nucleoside"
  modified_base 4: mod_base = OTHER; note = "2'-hydroxy nucleoside"
  modified_base 6: mod_base = OTHER; note = "2'-deoxy-3'-fluoro nucleoside"
  modified_base 8: mod_base = OTHER; note = "2'-deoxy-3'-fluoro nucleoside"
  modified_base 10: mod_base = OTHER; note = "2'-deoxy-3'-fluoro nucleoside"
  modified_base 12: mod_base = OTHER; note = "2'-deoxy-3'-fluoro nucleoside"
  modified_base 15..16: mod_base = OTHER; note = "2'-deoxy-3'-fluoro nucleoside"
  modified_base 18: mod_base = OTHER; note = "2'-deoxy-3'-fluoro nucleoside"
  modified_base 20: mod_base = OTHER; note = "2'-deoxy-3'-fluoro nucleoside"
  modified_base 22: mod_base = OTHER; note = "2'-deoxy-3'-fluoro nucleoside"
  modified_base 24: mod_base = OTHER; note = "2'-deoxy-3'-fluoro nucleoside"
  modified_base 26: mod_base = OTHER; note = "2'-deoxy-3'-fluoro nucleoside"
  modified_base 1: mod_base = OTHER; note = "2'-O-Methyl nucleoside"
  modified_base 3: mod_base = OTHER; note = "2'-O-Methyl nucleoside"
  modified_base 5: mod_base = OTHER; note = "2'-O-Methyl nucleoside"
  modified_base 7: mod_base = OTHER; note = "2'-O-Methyl nucleoside"
  modified_base 9: mod_base = OTHER; note = "2'-O-Methyl nucleoside"
  modified_base 11: mod_base = OTHER; note = "2'-O-Methyl nucleoside"
  modified_base 13..14: mod_base = OTHER; note = "2'-O-Methyl nucleoside"
  modified_base 17: mod_base = OTHER; note = "2'-O-Methyl nucleoside"
  modified_base 19: mod_base = OTHER; note = "2'-O-Methyl nucleoside"
  modified_base 21: mod_base = OTHER; note = "2'-O-Methyl nucleoside"
  modified_base 23: mod_base = OTHER; note = "2'-O-Methyl nucleoside"
  modified_base 25: mod_base = OTHER; note = "2'-O-Methyl nucleoside"
  modified_base 6: mod_base = OTHER; note = "phosphorothioate linked nucleoside"
  modified_base 26: mod_base = OTHER; note = "C6-SS-Alk-Me modified nucleoside"
  source 1..26: mol_type = other RNA
tatattgtgtctgcggcgttttatca

SEQ ID NO: 496 - RNA, 26 nt, synthetic construct
  misc_feature 1..26: note = HBV RNAi trigger sense strand
  modified_base 2: mod_base = OTHER; note = "2'-hydroxy nucleoside"
  modified_base 4: mod_base = OTHER; note = "2'-hydroxy nucleoside"
  modified_base 6: mod_base = OTHER; note = "2'-deoxy-3'-fluoro nucleoside"
  modified_base 8: mod_base = OTHER; note = "2'-deoxy-3'-fluoro nucleoside"
  modified_base 10: mod_base = OTHER; note = "2'-deoxy-3'-fluoro nucleoside"
  modified_base 12: mod_base = OTHER; note = "2'-deoxy-3'-fluoro nucleoside"
  modified_base 15..16: mod_base = OTHER; note = "2'-deoxy-3'-fluoro nucleoside"
  modified_base 18: mod_base = OTHER; note = "2'-deoxy-3'-fluoro nucleoside"
  modified_base 20: mod_base = OTHER; note = "2'-deoxy-3'-fluoro nucleoside"
  modified_base 22: mod_base = OTHER; note = "2'-deoxy-3'-fluoro nucleoside"
  modified_base 24: mod_base = OTHER; note = "2'-deoxy-3'-fluoro nucleoside"
  modified_base 26: mod_base = OTHER; note = "2'-deoxy-3'-fluoro nucleoside"
  modified_base 1: mod_base = OTHER; note = "2'-O-Methyl nucleoside"
  modified_base 3: mod_base = OTHER; note = "2'-O-Methyl nucleoside"
  modified_base 5: mod_base = OTHER; note = "2'-O-Methyl nucleoside"
  modified_base 7: mod_base = OTHER; note = "2'-O-Methyl nucleoside"
  modified_base 9: mod_base = OTHER; note = "2'-O-Methyl nucleoside"
  modified_base 11: mod_base = OTHER; note = "2'-O-Methyl nucleoside"
  modified_base 13..14: mod_base = OTHER; note = "2'-O-Methyl nucleoside"
  modified_base 17: mod_base = OTHER; note = "2'-O-Methyl nucleoside"
  modified_base 19: mod_base = OTHER; note = "2'-O-Methyl nucleoside"
  modified_base 21: mod_base = OTHER; note = "2'-O-Methyl nucleoside"
  modified_base 23: mod_base = OTHER; note = "2'-O-Methyl nucleoside"
  modified_base 25: mod_base = OTHER; note = "2'-O-Methyl nucleoside"
  modified_base 6: mod_base = OTHER; note = "phosphorothioate linked nucleoside"
  modified_base 26: mod_base = OTHER; note = "C6-SS-Alk-Me modified nucleoside"
  source 1..26: mol_type = other RNA
tatattttactagtgccatttgttca

SEQ ID NO: 497 - RNA, 26 nt, synthetic construct
  misc_feature 1..26: note = HBV RNAi trigger sense strand
  modified_base 2: mod_base = OTHER; note = "2'-hydroxy nucleoside"
  modified_base 4: mod_base = OTHER; note = "2'-hydroxy nucleoside"
  modified_base 6: mod_base = OTHER; note = "2'-deoxy-3'-fluoro nucleoside"
  modified_base 8: mod_base = OTHER; note = "2'-deoxy-3'-fluoro nucleoside"
  modified_base 10: mod_base = OTHER; note = "2'-deoxy-3'-fluoro nucleoside"
  modified_base 12: mod_base = OTHER; note = "2'-deoxy-3'-fluoro nucleoside"
  modified_base 15..16: mod_base = OTHER; note = "2'-deoxy-3'-fluoro nucleoside"
  modified_base 18: mod_base = OTHER; note = "2'-deoxy-3'-fluoro nucleoside"
  modified_base 20: mod_base = OTHER; note = "2'-deoxy-3'-fluoro nucleoside"
  modified_base 22: mod_base = OTHER; note = "2'-deoxy-3'-fluoro nucleoside"
  modified_base 24: mod_base = OTHER; note = "2'-deoxy-3'-fluoro nucleoside"
  modified_base 26: mod_base = OTHER; note = "2'-deoxy-3'-fluoro nucleoside"
  modified_base 1: mod_base = OTHER; note = "2'-O-Methyl nucleoside"
  modified_base 3: mod_base = OTHER; note = "2'-O-Methyl nucleoside"
  modified_base 5: mod_base = OTHER; note = "2'-O-Methyl nucleoside"
  modified_base 7: mod_base = OTHER; note = "2'-O-Methyl nucleoside"
  modified_base 9: mod_base = OTHER; note = "2'-O-Methyl nucleoside"
  modified_base 11: mod_base = OTHER; note = "2'-O-Methyl nucleoside"
  modified_base 13..14: mod_base = OTHER; note = "2'-O-Methyl nucleoside"
  modified_base 17: mod_base = OTHER; note = "2'-O-Methyl nucleoside"
  modified_base 19: mod_base = OTHER; note = "2'-O-Methyl nucleoside"
  modified_base 21: mod_base = OTHER; note = "2'-O-Methyl nucleoside"
  modified_base 23: mod_base = OTHER; note = "2'-O-Methyl nucleoside"
  modified_base 25: mod_base = OTHER; note = "2'-O-Methyl nucleoside"
  modified_base 6: mod_base = OTHER; note = "phosphorothioate linked nucleoside"
  modified_base 26: mod_base = OTHER; note = "C6-SS-Alk-Me modified nucleoside"
  source 1..26: mol_type = other RNA
tatattgccaagtgtttgctgacgca

SEQ ID NO: 498 - RNA, 26 nt, synthetic construct
  misc_feature 1..26: note = HBV RNAi trigger sense strand
  modified_base 2: mod_base = OTHER; note = "2'-hydroxy nucleoside"
  modified_base 4: mod_base = OTHER; note = "2'-hydroxy nucleoside"
  modified_base 6: mod_base = OTHER; note = "2'-deoxy-3'-fluoro nucleoside"
  modified_base 8: mod_base = OTHER; note = "2'-deoxy-3'-fluoro nucleoside"
  modified_base 10: mod_base = OTHER; note = "2'-deoxy-3'-fluoro nucleoside"
  modified_base 12: mod_base = OTHER; note = "2'-deoxy-3'-fluoro nucleoside"
  modified_base 15..16: mod_base = OTHER; note = "2'-deoxy-3'-fluoro nucleoside"
  modified_base 18: mod_base = OTHER; note = "2'-deoxy-3'-fluoro nucleoside"
  modified_base 20: mod_base = OTHER; note = "2'-deoxy-3'-fluoro nucleoside"
  modified_base 22: mod_base = OTHER; note = "2'-deoxy-3'-fluoro nucleoside"
  modified_base 24: mod_base = OTHER; note = "2'-deoxy-3'-fluoro nucleoside"
  modified_base 26: mod_base = OTHER; note = "2'-deoxy-3'-fluoro nucleoside"
  modified_base 1: mod_base = OTHER; note = "2'-O-Methyl nucleoside"
  modified_base 3: mod_base = OTHER; note = "2'-O-Methyl nucleoside"
  modified_base 5: mod_base = OTHER; note = "2'-O-Methyl nucleoside"
  modified_base 7: mod_base = OTHER; note = "2'-O-Methyl nucleoside"
  modified_base 9: mod_base = OTHER; note = "2'-O-Methyl nucleoside"
  modified_base 11: mod_base = OTHER; note = "2'-O-Methyl nucleoside"
  modified_base 13..14: mod_base = OTHER; note = "2'-O-Methyl nucleoside"
  modified_base 17: mod_base = OTHER; note = "2'-O-Methyl nucleoside"
  modified_base 19: mod_base = OTHER; note = "2'-O-Methyl nucleoside"
  modified_base 21: mod_base = OTHER; note = "2'-O-Methyl nucleoside"
  modified_base 23: mod_base = OTHER; note = "2'-O-Methyl nucleoside"
  modified_base 25: mod_base = OTHER; note = "2'-O-Methyl nucleoside"
  modified_base 6: mod_base = OTHER; note = "phosphorothioate linked nucleoside"
  modified_base 26: mod_base = OTHER; note = "C6-SS-Alk-Me modified nucleoside"
  source 1..26: mol_type = other RNA
tatattgccatttgttcagtggttca

SEQ ID NO: 499 - RNA, 26 nt, synthetic construct
  misc_feature 1..26: note = HBV RNAi trigger sense strand
  modified_base 2: mod_base = OTHER; note = "2'-hydroxy nucleoside"
  modified_base 4: mod_base = OTHER; note = "2'-hydroxy nucleoside"
  modified_base 6: mod_base = OTHER; note = "2'-deoxy-3'-fluoro nucleoside"
  modified_base 8: mod_base = OTHER; note = "2'-deoxy-3'-fluoro nucleoside"
  modified_base 10: mod_base = OTHER; note = "2'-deoxy-3'-fluoro nucleoside"
  modified_base 12: mod_base = OTHER; note = "2'-deoxy-3'-fluoro nucleoside"
  modified_base 15..16: mod_base = OTHER; note = "2'-deoxy-3'-fluoro nucleoside"
  modified_base 18: mod_base = OTHER; note = "2'-deoxy-3'-fluoro nucleoside"
  modified_base 20: mod_base = OTHER; note = "2'-deoxy-3'-fluoro nucleoside"
  modified_base 22: mod_base = OTHER; note = "2'-deoxy-3'-fluoro nucleoside"
  modified_base 24: mod_base = OTHER; note = "2'-deoxy-3'-fluoro nucleoside"
  modified_base 26: mod_base = OTHER; note = "2'-deoxy-3'-fluoro nucleoside"
  modified_base 1: mod_base = OTHER; note = "2'-O-Methyl nucleoside"
  modified_base 3: mod_base = OTHER; note = "2'-O-Methyl nucleoside"
  modified_base 5: mod_base = OTHER; note = "2'-O-Methyl nucleoside"
  modified_base 7: mod_base = OTHER; note = "2'-O-Methyl nucleoside"
  modified_base 9: mod_base = OTHER; note = "2'-O-Methyl nucleoside"
  modified_base 11: mod_base = OTHER; note = "2'-O-Methyl nucleoside"
  modified_base 13..14: mod_base = OTHER; note = "2'-O-Methyl nucleoside"
  modified_base 17: mod_base = OTHER; note = "2'-O-Methyl nucleoside"
  modified_base 19: mod_base = OTHER; note = "2'-O-Methyl nucleoside"
  modified_base 21: mod_base = OTHER; note = "2'-O-Methyl nucleoside"
  modified_base 23: mod_base = OTHER; note = "2'-O-Methyl nucleoside"
  modified_base 25: mod_base = OTHER; note = "2'-O-Methyl nucleoside"
  modified_base 6: mod_base = OTHER; note = "phosphorothioate linked nucleoside"
  modified_base 26: mod_base = OTHER; note = "C6-SS-Alk-Me modified nucleoside"
  source 1..26: mol_type = other RNA
tatatatcaaggtatgttgcccgtta

SEQ ID NO: 500 - RNA, 26 nt, synthetic construct
  misc_feature 1..26: note = HBV RNAi trigger sense strand
  modified_base 2: mod_base = OTHER; note = "2'-hydroxy nucleoside"
  modified_base 4: mod_base = OTHER; note = "2'-hydroxy nucleoside"
  modified_base 6: mod_base = OTHER; note = "2'-deoxy-3'-fluoro nucleoside"
  modified_base 8: mod_base = OTHER; note = "2'-deoxy-3'-fluoro nucleoside"
  modified_base 10: mod_base = OTHER; note = "2'-deoxy-3'-fluoro nucleoside"
  modified_base 12: mod_base = OTHER; note = "2'-deoxy-3'-fluoro nucleoside"
  modified_base 15..16: mod_base = OTHER; note = "2'-deoxy-3'-fluoro nucleoside"
  modified_base 18: mod_base = OTHER; note = "2'-deoxy-3'-fluoro nucleoside"
  modified_base 20: mod_base = OTHER; note = "2'-deoxy-3'-fluoro nucleoside"
  modified_base 22: mod_base = OTHER; note = "2'-deoxy-3'-fluoro nucleoside"
  modified_base 24: mod_base = OTHER; note = "2'-deoxy-3'-fluoro nucleoside"
  modified_base 26: mod_base = OTHER; note = "2'-deoxy-3'-fluoro nucleoside"
  modified_base 1: mod_base = OTHER; note = "2'-O-Methyl nucleoside"
  modified_base 3: mod_base = OTHER; note = "2'-O-Methyl nucleoside"
  modified_base 5: mod_base = OTHER; note = "2'-O-Methyl nucleoside"
  modified_base 7: mod_base = OTHER; note = "2'-O-Methyl nucleoside"
  modified_base 9: mod_base = OTHER; note = "2'-O-Methyl nucleoside"
  modified_base 11: mod_base = OTHER; note = "2'-O-Methyl nucleoside"
  modified_base 13..14: mod_base = OTHER; note = "2'-O-Methyl nucleoside"
  modified_base 17: mod_base = OTHER; note = "2'-O-Methyl nucleoside"
  modified_base 19: mod_base = OTHER; note = "2'-O-Methyl nucleoside"
  modified_base 21: mod_base = OTHER; note = "2'-O-Methyl nucleoside"
  modified_base 23: mod_base = OTHER; note = "2'-O-Methyl nucleoside"
  modified_base 25: mod_base = OTHER; note = "2'-O-Methyl nucleoside"
  modified_base 6: mod_base = OTHER; note = "phosphorothioate linked nucleoside"
  modified_base 26: mod_base = OTHER; note = "C6-SS-Alk-Me modified nucleoside"
  source 1..26: mol_type = other RNA
tatattcctggctcagtttactagta

SEQ ID NO: 501 - RNA, 26 nt, synthetic construct
  misc_feature 1..26: note = HBV RNAi trigger sense strand
  modified_base 2: mod_base = OTHER; note = "2'-hydroxy nucleoside"
  modified_base 4: mod_base = OTHER; note = "2'-hydroxy nucleoside"
  modified_base 6: mod_base = OTHER; note = "2'-deoxy-3'-fluoro nucleoside"
  modified_base 8: mod_base = OTHER; note = "2'-deoxy-3'-fluoro nucleoside"
  modified_base 10: mod_base = OTHER; note = "2'-deoxy-3'-fluoro nucleoside"
  modified_base 12: mod_base = OTHER; note = "2'-deoxy-3'-fluoro nucleoside"
  modified_base 15..16: mod_base = OTHER; note = "2'-deoxy-3'-fluoro nucleoside"
  modified_base 18: mod_base = OTHER; note = "2'-deoxy-3'-fluoro nucleoside"
  modified_base 20: mod_base = OTHER; note = "2'-deoxy-3'-fluoro nucleoside"
  modified_base 22: mod_base = OTHER; note = "2'-deoxy-3'-fluoro nucleoside"
  modified_base 24: mod_base = OTHER; note = "2'-deoxy-3'-fluoro nucleoside"
  modified_base 26: mod_base = OTHER; note = "2'-deoxy-3'-fluoro nucleoside"
  modified_base 1: mod_base = OTHER; note = "2'-O-Methyl nucleoside"
  modified_base 3: mod_base = OTHER; note = "2'-O-Methyl nucleoside"
  modified_base 5: mod_base = OTHER; note = "2'-O-Methyl nucleoside"
  modified_base 7: mod_base = OTHER; note = "2'-O-Methyl nucleoside"
  modified_base 9: mod_base = OTHER; note = "2'-O-Methyl nucleoside"
  modified_base 11: mod_base = OTHER; note = "2'-O-Methyl nucleoside"
  modified_base 13..14: mod_base = OTHER; note = "2'-O-Methyl nucleoside"
  modified_base 17: mod_base = OTHER; note = "2'-O-Methyl nucleoside"
  modified_base 19: mod_base = OTHER; note = "2'-O-Methyl nucleoside"
  modified_base 21: mod_base = OTHER; note = "2'-O-Methyl nucleoside"
  modified_base 23: mod_base = OTHER; note = "2'-O-Methyl nucleoside"
  modified_base 25: mod_base = OTHER; note = "2'-O-Methyl nucleoside"
  modified_base 6: mod_base = OTHER; note = "phosphorothioate linked nucleoside"
  modified_base 26: mod_base = OTHER; note = "C6-SS-Alk-Me modified nucleoside"
  source 1..26: mol_type = other RNA
tatatggtatgttgcccgtttgtcca

SEQ ID NO: 502 - RNA, 26 nt, synthetic construct
  misc_feature 1..26: note = HBV RNAi trigger sense strand
  modified_base 2: mod_base = OTHER; note = "2'-hydroxy nucleoside"
  modified_base 4: mod_base = OTHER; note = "2'-hydroxy nucleoside"
  modified_base 6: mod_base = OTHER; note = "2'-deoxy-3'-fluoro nucleoside"
  modified_base 8: mod_base = OTHER; note = "2'-deoxy-3'-fluoro nucleoside"
  modified_base 10: mod_base = OTHER; note = "2'-deoxy-3'-fluoro nucleoside"
  modified_base 12: mod_base = OTHER; note = "2'-deoxy-3'-fluoro nucleoside"
  modified_base 15..16: mod_base = OTHER; note = "2'-deoxy-3'-fluoro nucleoside"
  modified_base 18: mod_base = OTHER; note = "2'-deoxy-3'-fluoro nucleoside"
  modified_base 20: mod_base = OTHER; note = "2'-deoxy-3'-fluoro nucleoside"
  modified_base 22: mod_base = OTHER; note = "2'-deoxy-3'-fluoro nucleoside"
  modified_base 24: mod_base = OTHER; note = "2'-deoxy-3'-fluoro nucleoside"
  modified_base 26: mod_base = OTHER; note = "2'-deoxy-3'-fluoro nucleoside"
  modified_base 1: mod_base = OTHER; note = "2'-O-Methyl nucleoside"
  modified_base 3: mod_base = OTHER; note = "2'-O-Methyl nucleoside"
  modified_base 5: mod_base = OTHER; note = "2'-O-Methyl nucleoside"
  modified_base 7: mod_base = OTHER; note = "2'-O-Methyl nucleoside"
  modified_base 9: mod_base = OTHER; note = "2'-O-Methyl nucleoside"
  modified_base 11: mod_base = OTHER; note = "2'-O-Methyl nucleoside"
  modified_base 13..14: mod_base = OTHER; note = "2'-O-Methyl nucleoside"
  modified_base 17: mod_base = OTHER; note = "2'-O-Methyl nucleoside"
  modified_base 19: mod_base = OTHER; note = "2'-O-Methyl nucleoside"
  modified_base 21: mod_base = OTHER; note = "2'-O-Methyl nucleoside"
  modified_base 23: mod_base = OTHER; note = "2'-O-Methyl nucleoside"
  modified_base 25: mod_base = OTHER; note = "2'-O-Methyl nucleoside"
  modified_base 6: mod_base = OTHER; note = "phosphorothioate linked nucleoside"
  modified_base 26: mod_base = OTHER; note = "C6-SS-Alk-Me modified nucleoside"
  source 1..26: mol_type = other RNA
tatattatcaaggtatgttgcccgta

SEQ ID NO: 503 - RNA, 26 nt, synthetic construct
  misc_feature 1..26: note = HBV RNAi trigger sense strand
  modified_base 2: mod_base = OTHER; note = "2'-hydroxy nucleoside"
  modified_base 4: mod_base = OTHER; note = "2'-hydroxy nucleoside"
  modified_base 6: mod_base = OTHER; note = "2'-deoxy-3'-fluoro nucleoside"
  modified_base 8: mod_base = OTHER; note = "2'-deoxy-3'-fluoro nucleoside"
  modified_base 10: mod_base = OTHER; note = "2'-deoxy-3'-fluoro nucleoside"
  modified_base 12: mod_base = OTHER; note = "2'-deoxy-3'-fluoro nucleoside"
  modified_base 15..16: mod_base = OTHER; note = "2'-deoxy-3'-fluoro nucleoside"
  modified_base 18: mod_base = OTHER; note = "2'-deoxy-3'-fluoro nucleoside"
  modified_base 20: mod_base = OTHER; note = "2'-deoxy-3'-fluoro nucleoside"
  modified_base 22: mod_base = OTHER; note = "2'-deoxy-3'-fluoro nucleoside"
  modified_base 24: mod_base = OTHER; note = "2'-deoxy-3'-fluoro nucleoside"
  modified_base 26: mod_base = OTHER; note = "2'-deoxy-3'-fluoro nucleoside"
  modified_base 1: mod_base = OTHER; note = "2'-O-Methyl nucleoside"
  modified_base 3: mod_base = OTHER; note = "2'-O-Methyl nucleoside"
  modified_base 5: mod_base = OTHER; note = "2'-O-Methyl nucleoside"
  modified_base 7: mod_base = OTHER; note = "2'-O-Methyl nucleoside"
  modified_base 9: mod_base = OTHER; note = "2'-O-Methyl nucleoside"
  modified_base 11: mod_base = OTHER; note = "2'-O-Methyl nucleoside"
  modified_base 13..14: mod_base = OTHER; note = "2'-O-Methyl nucleoside"
  modified_base 17: mod_base = OTHER; note = "2'-O-Methyl nucleoside"
  modified_base 19: mod_base = OTHER; note = "2'-O-Methyl nucleoside"
  modified_base 21: mod_base = OTHER; note = "2'-O-Methyl nucleoside"
  modified_base 23: mod_base = OTHER; note = "2'-O-Methyl nucleoside"
  modified_base 25: mod_base = OTHER; note = "2'-O-Methyl nucleoside"
  modified_base 6: mod_base = OTHER; note = "phosphorothioate linked nucleoside"
  modified_base 26: mod_base = OTHER; note = "C6-SS-Alk-Me modified nucleoside"
  source 1..26: mol_type = other RNA
tatatgtccgtgtgcacttcgcttca

SEQ ID NO: 504 - RNA, 26 nt, synthetic construct
  misc_feature 1..26: note = HBV RNAi trigger sense strand
  modified_base 2: mod_base = OTHER; note = "2'-hydroxy nucleoside"
  modified_base 4: mod_base = OTHER; note = "2'-hydroxy nucleoside"
  modified_base 6: mod_base = OTHER; note = "2'-deoxy-3'-fluoro nucleoside"
  modified_base 8: mod_base = OTHER; note = "2'-deoxy-3'-fluoro nucleoside"
  modified_base 10..11: mod_base = OTHER; note = "2'-deoxy-3'-fluoro nucleoside"
  modified_base 14: mod_base = OTHER; note = "2'-deoxy-3'-fluoro nucleoside"
  modified_base 16: mod_base = OTHER; note = "2'-deoxy-3'-fluoro nucleoside"
  modified_base 18: mod_base = OTHER; note = "2'-deoxy-3'-fluoro nucleoside"
  modified_base 20: mod_base = OTHER; note = "2'-deoxy-3'-fluoro nucleoside"
  modified_base 22: mod_base = OTHER; note = "2'-deoxy-3'-fluoro nucleoside"
  modified_base 24: mod_base = OTHER; note = "2'-deoxy-3'-fluoro nucleoside"
  modified_base 26: mod_base = OTHER; note = "2'-deoxy-3'-fluoro nucleoside"
  modified_base 1: mod_base = OTHER; note = "2'-O-Methyl nucleoside"
  modified_base 3: mod_base = OTHER; note = "2'-O-Methyl nucleoside"
  modified_base 5: mod_base = OTHER; note = "2'-O-Methyl nucleoside"
  modified_base 7: mod_base = OTHER; note = "2'-O-Methyl nucleoside"
  modified_base 9: mod_base = OTHER; note = "2'-O-Methyl nucleoside"
  modified_base 12..13: mod_base = OTHER; note = "2'-O-Methyl nucleoside"
  modified_base 15: mod_base = OTHER; note = "2'-O-Methyl nucleoside"
  modified_base 17: mod_base = OTHER; note = "2'-O-Methyl nucleoside"
  modified_base 19: mod_base = OTHER; note = "2'-O-Methyl nucleoside"
  modified_base 21: mod_base = OTHER; note = "2'-O-Methyl nucleoside"
  modified_base 23: mod_base = OTHER; note = "2'-O-Methyl nucleoside"
  modified_base 25: mod_base = OTHER; note = "2'-O-Methyl nucleoside"
  modified_base 6: mod_base = OTHER; note = "phosphorothioate linked nucleoside"
  modified_base 26: mod_base = OTHER; note = "C6-SS-Alk-Me modified nucleoside"
  source 1..26: mol_type = other RNA
tatattgtgtctgcggcgttttatca

SEQ ID NO: 505 - RNA, 26 nt, synthetic construct
  misc_feature 1..26: note = HBV RNAi trigger sense strand
  modified_base 2: mod_base = OTHER; note = "2'-hydroxy nucleoside"
  modified_base 4: mod_base = OTHER; note = "2'-hydroxy nucleoside"
  modified_base 6: mod_base = OTHER; note = "2'-deoxy-3'-fluoro nucleoside"
  modified_base 8: mod_base = OTHER; note = "2'-deoxy-3'-fluoro nucleoside"
  modified_base 10..11: mod_base = OTHER; note = "2'-deoxy-3'-fluoro nucleoside"
  modified_base 14: mod_base = OTHER; note = "2'-deoxy-3'-fluoro nucleoside"
  modified_base 16: mod_base = OTHER; note = "2'-deoxy-3'-fluoro nucleoside"
  modified_base 18: mod_base = OTHER; note = "2'-deoxy-3'-fluoro nucleoside"
  modified_base 20: mod_base = OTHER; note = "2'-deoxy-3'-fluoro nucleoside"
  modified_base 22: mod_base = OTHER; note = "2'-deoxy-3'-fluoro nucleoside"
  modified_base 24: mod_base = OTHER; note = "2'-deoxy-3'-fluoro nucleoside"
  modified_base 26: mod_base = OTHER; note = "2'-deoxy-3'-fluoro nucleoside"
  modified_base 1: mod_base = OTHER; note = "2'-O-Methyl nucleoside"
  modified_base 3: mod_base = OTHER; note = "2'-O-Methyl nucleoside"
  modified_base 5: mod_base = OTHER; note = "2'-O-Methyl nucleoside"
  modified_base 7: mod_base = OTHER; note = "2'-O-Methyl nucleoside"
  modified_base 9: mod_base = OTHER; note = "2'-O-Methyl nucleoside"
  modified_base 12..13: mod_base = OTHER; note = "2'-O-Methyl nucleoside"
  modified_base 15: mod_base = OTHER; note = "2'-O-Methyl nucleoside"
  modified_base 17: mod_base = OTHER; note = "2'-O-Methyl nucleoside"
  modified_base 19: mod_base = OTHER; note = "2'-O-Methyl nucleoside"
  modified_base 21: mod_base = OTHER; note = "2'-O-Methyl nucleoside"
  modified_base 23: mod_base = OTHER; note = "2'-O-Methyl nucleoside"
  modified_base 25: mod_base = OTHER; note = "2'-O-Methyl nucleoside"
  modified_base 6: mod_base = OTHER; note = "phosphorothioate linked nucleoside"
  modified_base 26: mod_base = OTHER; note = "C6-SS-Alk-Me modified nucleoside"
  source 1..26: mol_type = other RNA
tatattttactagtgccatttgttca

SEQ ID NO: 506 - RNA, 26 nt, synthetic construct
  misc_feature 1..26: note = HBV RNAi trigger sense strand
  modified_base 2: mod_base = OTHER; note = "2'-hydroxy nucleoside"
  modified_base 4: mod_base = OTHER; note = "2'-hydroxy nucleoside"
  modified_base 6: mod_base = OTHER; note = "2'-deoxy-3'-fluoro nucleoside"
  modified_base 8: mod_base = OTHER; note = "2'-deoxy-3'-fluoro nucleoside"
  modified_base 10..11: mod_base = OTHER; note = "2'-deoxy-3'-fluoro nucleoside"
  modified_base 14: mod_base = OTHER; note = "2'-deoxy-3'-fluoro nucleoside"
  modified_base 16: mod_base = OTHER; note = "2'-deoxy-3'-fluoro nucleoside"
  modified_base 18: mod_base = OTHER; note = "2'-deoxy-3'-fluoro nucleoside"
  modified_base 20: mod_base = OTHER; note = "2'-deoxy-3'-fluoro nucleoside"
  modified_base 22: mod_base = OTHER; note = "2'-deoxy-3'-fluoro nucleoside"
  modified_base 24: mod_base = OTHER; note = "2'-deoxy-3'-fluoro nucleoside"
  modified_base 26: mod_base = OTHER; note = "2'-deoxy-3'-fluoro nucleoside"
  modified_base 1: mod_base = OTHER; note = "2'-O-Methyl nucleoside"
  modified_base 3: mod_base = OTHER; note = "2'-O-Methyl nucleoside"
  modified_base 5: mod_base = OTHER; note = "2'-O-Methyl nucleoside"
  modified_base 7: mod_base = OTHER; note = "2'-O-Methyl nucleoside"
  modified_base 9: mod_base = OTHER; note = "2'-O-Methyl nucleoside"
  modified_base 12..13: mod_base = OTHER; note = "2'-O-Methyl nucleoside"
  modified_base 15: mod_base = OTHER; note = "2'-O-Methyl nucleoside"
  modified_base 17: mod_base = OTHER; note = "2'-O-Methyl nucleoside"
  modified_base 19: mod_base = OTHER; note = "2'-O-Methyl nucleoside"
  modified_base 21: mod_base = OTHER; note = "2'-O-Methyl nucleoside"
  modified_base 23: mod_base = OTHER; note = "2'-O-Methyl nucleoside"
  modified_base 25: mod_base = OTHER; note = "2'-O-Methyl nucleoside"
  modified_base 6: mod_base = OTHER; note = "phosphorothioate linked nucleoside"
  modified_base 26: mod_base = OTHER; note = "C6-SS-Alk-Me modified nucleoside"
  source 1..26: mol_type = other RNA
tatattgccaagtgtttgctgacgca

SEQ ID NO: 507 - RNA, 26 nt, synthetic construct
  misc_feature 1..26: note = HBV RNAi trigger sense strand
  modified_base 2: mod_base = OTHER; note = "2'-hydroxy nucleoside"
  modified_base 4: mod_base = OTHER; note = "2'-hydroxy nucleoside"
  modified_base 6: mod_base = OTHER; note = "2'-deoxy-3'-fluoro nucleoside"
  modified_base 8: mod_base = OTHER; note = "2'-deoxy-3'-fluoro nucleoside"
  modified_base 10..11: mod_base = OTHER; note = "2'-deoxy-3'-fluoro nucleoside"
  modified_base 14: mod_base = OTHER; note = "2'-deoxy-3'-fluoro nucleoside"
  modified_base 16: mod_base = OTHER; note = "2'-deoxy-3'-fluoro nucleoside"
  modified_base 18: mod_base = OTHER; note = "2'-deoxy-3'-fluoro nucleoside"
  modified_base 20: mod_base = OTHER; note = "2'-deoxy-3'-fluoro nucleoside"
  modified_base 22: mod_base = OTHER; note = "2'-deoxy-3'-fluoro nucleoside"
  modified_base 24: mod_base = OTHER; note = "2'-deoxy-3'-fluoro nucleoside"
  modified_base 26: mod_base = OTHER; note = "2'-deoxy-3'-fluoro nucleoside"
  modified_base 1: mod_base = OTHER; note = "2'-O-Methyl nucleoside"
  modified_base 3: mod_base = OTHER; note = "2'-O-Methyl nucleoside"
  modified_base 5: mod_base = OTHER; note = "2'-O-Methyl nucleoside"
  modified_base 7: mod_base = OTHER; note = "2'-O-Methyl nucleoside"
  modified_base 9: mod_base = OTHER; note = "2'-O-Methyl nucleoside"
  modified_base 12..13: mod_base = OTHER; note = "2'-O-Methyl nucleoside"
  modified_base 15: mod_base = OTHER; note = "2'-O-Methyl nucleoside"
  modified_base 17: mod_base = OTHER; note = "2'-O-Methyl nucleoside"
  modified_base 19: mod_base = OTHER; note = "2'-O-Methyl nucleoside"
  modified_base 21: mod_base = OTHER; note = "2'-O-Methyl nucleoside"
  modified_base 23: mod_base = OTHER; note = "2'-O-Methyl nucleoside"
  modified_base 25: mod_base = OTHER; note = "2'-O-Methyl nucleoside"
  modified_base 6: mod_base = OTHER; note = "phosphorothioate linked nucleoside"
  modified_base 26: mod_base = OTHER; note = "C6-SS-Alk-Me modified nucleoside"
  source 1..26: mol_type = other RNA
tatattgccatttgttcagtggttca

SEQ ID NO: 508 - RNA, 26 nt, synthetic construct
  misc_feature 1..26: note = HBV RNAi trigger sense strand
  modified_base 2: mod_base = OTHER; note = "2'-hydroxy nucleoside"
  modified_base 4: mod_base = OTHER; note = "2'-hydroxy nucleoside"
  modified_base 6: mod_base = OTHER; note = "2'-deoxy-3'-fluoro nucleoside"
  modified_base 8: mod_base = OTHER; note = "2'-deoxy-3'-fluoro nucleoside"
  modified_base 10..11: mod_base = OTHER; note = "2'-deoxy-3'-fluoro nucleoside"
  modified_base 14: mod_base = OTHER; note = "2'-deoxy-3'-fluoro nucleoside"
  modified_base 16: mod_base = OTHER; note = "2'-deoxy-3'-fluoro nucleoside"
  modified_base 18: mod_base = OTHER; note = "2'-deoxy-3'-fluoro nucleoside"
  modified_base 20: mod_base = OTHER; note = "2'-deoxy-3'-fluoro nucleoside"
  modified_base 22: mod_base = OTHER; note = "2'-deoxy-3'-fluoro nucleoside"
  modified_base 24: mod_base = OTHER; note = "2'-deoxy-3'-fluoro nucleoside"
  modified_base 26: mod_base = OTHER; note = "2'-deoxy-3'-fluoro nucleoside"
  modified_base 1: mod_base = OTHER; note = "2'-O-Methyl nucleoside"
  modified_base 3: mod_base = OTHER; note = "2'-O-Methyl nucleoside"
  modified_base 5: mod_base = OTHER; note = "2'-O-Methyl nucleoside"
  modified_base 7: mod_base = OTHER; note = "2'-O-Methyl nucleoside"
  modified_base 9: mod_base = OTHER; note = "2'-O-Methyl nucleoside"
  modified_base 12..13: mod_base = OTHER; note = "2'-O-Methyl nucleoside"
  modified_base 15: mod_base = OTHER; note = "2'-O-Methyl nucleoside"
  modified_base 17: mod_base = OTHER; note = "2'-O-Methyl nucleoside"
  modified_base 19: mod_base = OTHER; note = "2'-O-Methyl nucleoside"
  modified_base 21: mod_base = OTHER; note = "2'-O-Methyl nucleoside"
  modified_base 23: mod_base = OTHER; note = "2'-O-Methyl nucleoside"
  modified_base 25: mod_base = OTHER; note = "2'-O-Methyl nucleoside"
  modified_base 6: mod_base = OTHER; note = "phosphorothioate linked nucleoside"
  modified_base 26: mod_base = OTHER; note = "C6-SS-Alk-Me modified nucleoside"
  source 1..26: mol_type = other RNA
tatatatcaaggtatgttgcccgtta

SEQ ID NO: 509 - RNA, 26 nt, synthetic construct
  misc_feature 1..26: note = HBV RNAi trigger sense strand
  modified_base 2: mod_base = OTHER; note = "2'-hydroxy nucleoside"
  modified_base 4: mod_base = OTHER; note = "2'-hydroxy nucleoside"
  modified_base 6: mod_base = OTHER; note = "2'-deoxy-3'-fluoro nucleoside"
  modified_base 8: mod_base = OTHER; note = "2'-deoxy-3'-fluoro nucleoside"
  modified_base 10..11: mod_base = OTHER; note = "2'-deoxy-3'-fluoro nucleoside"
  modified_base 14: mod_base = OTHER; note = "2'-deoxy-3'-fluoro nucleoside"
  modified_base 16: mod_base = OTHER; note = "2'-deoxy-3'-fluoro nucleoside"
  modified_base 18: mod_base = OTHER; note = "2'-deoxy-3'-fluoro nucleoside"
  modified_base 20: mod_base = OTHER; note = "2'-deoxy-3'-fluoro nucleoside"
  modified_base 22: mod_base = OTHER; note = "2'-deoxy-3'-fluoro nucleoside"
  modified_base 24: mod_base = OTHER; note = "2'-deoxy-3'-fluoro nucleoside"
  modified_base 26: mod_base = OTHER; note = "2'-deoxy-3'-fluoro nucleoside"
  modified_base 1: mod_base = OTHER; note = "2'-O-Methyl nucleoside"
  modified_base 3: mod_base = OTHER; note = "2'-O-Methyl nucleoside"
  modified_base 5: mod_base = OTHER; note = "2'-O-Methyl nucleoside"
  modified_base 7: mod_base = OTHER; note = "2'-O-Methyl nucleoside"
  modified_base 9: mod_base = OTHER; note = "2'-O-Methyl nucleoside"
  modified_base 12..13: mod_base = OTHER; note = "2'-O-Methyl nucleoside"
  modified_base 15: mod_base = OTHER; note = "2'-O-Methyl nucleoside"
  modified_base 17: mod_base = OTHER; note = "2'-O-Methyl nucleoside"
  modified_base 19: mod_base = OTHER; note = "2'-O-Methyl nucleoside"
  modified_base 21: mod_base = OTHER; note = "2'-O-Methyl nucleoside"
  modified_base 23: mod_base = OTHER; note = "2'-O-Methyl nucleoside"
  modified_base 25: mod_base = OTHER; note = "2'-O-Methyl nucleoside"
  modified_base 6: mod_base = OTHER; note = "phosphorothioate linked nucleoside"
  modified_base 26: mod_base = OTHER; note = "C6-SS-Alk-Me modified nucleoside"
  source 1..26: mol_type = other RNA
tatattcctggctcagtttactagta

SEQ ID NO: 510 - RNA, 26 nt, synthetic construct
  misc_feature 1..26: note = HBV RNAi trigger sense strand
  modified_base 2: mod_base = OTHER; note = "2'-hydroxy nucleoside"
  modified_base 4: mod_base = OTHER; note = "2'-hydroxy nucleoside"
  modified_base 6: mod_base = OTHER; note = "2'-deoxy-3'-fluoro nucleoside"
  modified_base 8: mod_base = OTHER; note = "2'-deoxy-3'-fluoro nucleoside"
  modified_base 10..11: mod_base = OTHER; note = "2'-deoxy-3'-fluoro nucleoside"
  modified_base 14: mod_base = OTHER; note = "2'-deoxy-3'-fluoro nucleoside"
  modified_base 16: mod_base = OTHER; note = "2'-deoxy-3'-fluoro nucleoside"
  modified_base 18: mod_base = OTHER; note = "2'-deoxy-3'-fluoro nucleoside"
  modified_base 20: mod_base = OTHER; note = "2'-deoxy-3'-fluoro nucleoside"
  modified_base 22: mod_base = OTHER; note = "2'-deoxy-3'-fluoro nucleoside"
  modified_base 24: mod_base = OTHER; note = "2'-deoxy-3'-fluoro nucleoside"
  modified_base 26: mod_base = OTHER; note = "2'-deoxy-3'-fluoro nucleoside"
  modified_base 1: mod_base = OTHER; note = "2'-O-Methyl nucleoside"
  modified_base 3: mod_base = OTHER; note = "2'-O-Methyl nucleoside"
  modified_base 5: mod_base = OTHER; note = "2'-O-Methyl nucleoside"
  modified_base 7: mod_base = OTHER; note = "2'-O-Methyl nucleoside"
  modified_base 9: mod_base = OTHER; note = "2'-O-Methyl nucleoside"
  modified_base 12..13: mod_base = OTHER; note = "2'-O-Methyl nucleoside"
  modified_base 15: mod_base = OTHER; note = "2'-O-Methyl nucleoside"
  modified_base 17: mod_base = OTHER; note = "2'-O-Methyl nucleoside"
  modified_base 19: mod_base = OTHER; note = "2'-O-Methyl nucleoside"
  modified_base 21: mod_base = OTHER; note = "2'-O-Methyl nucleoside"
  modified_base 23: mod_base = OTHER; note = "2'-O-Methyl nucleoside"
  modified_base 25: mod_base = OTHER; note = "2'-O-Methyl nucleoside"
  modified_base 6: mod_base = OTHER; note = "phosphorothioate linked nucleoside"
  modified_base 26: mod_base = OTHER; note = "C6-SS-Alk-Me modified nucleoside"
  source 1..26: mol_type = other RNA
tatatggtatgttgcccgtttgtcca

SEQ ID NO: 511 - RNA, 26 nt, synthetic construct
  misc_feature 1..26: note = HBV RNAi trigger sense strand
  modified_base 2: mod_base = OTHER; note = "2'-hydroxy nucleoside"
  modified_base 4: mod_base = OTHER; note = "2'-hydroxy nucleoside"
  modified_base 6: mod_base = OTHER; note = "2'-deoxy-3'-fluoro nucleoside"
  modified_base 8: mod_base = OTHER; note = "2'-deoxy-3'-fluoro nucleoside"
  modified_base 10..11: mod_base = OTHER; note = "2'-deoxy-3'-fluoro nucleoside"
  modified_base 14: mod_base = OTHER; note = "2'-deoxy-3'-fluoro nucleoside"
  modified_base 16: mod_base = OTHER; note = "2'-deoxy-3'-fluoro nucleoside"
  modified_base 18: mod_base = OTHER; note = "2'-deoxy-3'-fluoro nucleoside"
  modified_base 20: mod_base = OTHER; note = "2'-deoxy-3'-fluoro nucleoside"
  modified_base 22: mod_base = OTHER; note = "2'-deoxy-3'-fluoro nucleoside"
  modified_base 24: mod_base = OTHER; note = "2'-deoxy-3'-fluoro nucleoside"
  modified_base 26: mod_base = OTHER; note = "2'-deoxy-3'-fluoro nucleoside"
  modified_base 1: mod_base = OTHER; note = "2'-O-Methyl nucleoside"
  modified_base 3: mod_base = OTHER; note = "2'-O-Methyl nucleoside"
  modified_base 5: mod_base = OTHER; note = "2'-O-Methyl nucleoside"
  modified_base 7: mod_base = OTHER; note = "2'-O-Methyl nucleoside"
  modified_base 9: mod_base = OTHER; note = "2'-O-Methyl nucleoside"
  modified_base 12..13: mod_base = OTHER; note = "2'-O-Methyl nucleoside"
  modified_base 15: mod_base = OTHER; note = "2'-O-Methyl nucleoside"
  modified_base 17: mod_base = OTHER; note = "2'-O-Methyl nucleoside"
  modified_base 19: mod_base = OTHER; note = "2'-O-Methyl nucleoside"
  modified_base 21: mod_base = OTHER; note = "2'-O-Methyl nucleoside"
  modified_base 23: mod_base = OTHER; note = "2'-O-Methyl nucleoside"
  modified_base 25: mod_base = OTHER; note = "2'-O-Methyl nucleoside"
  modified_base 6: mod_base = OTHER; note = "phosphorothioate linked nucleoside"
  modified_base 26: mod_base = OTHER; note = "C6-SS-Alk-Me modified nucleoside"
  source 1..26: mol_type = other RNA
tatattatcaaggtatgttgcccgta

SEQ ID NO: 512 - RNA, 26 nt, synthetic construct
  misc_feature 1..26: note = HBV RNAi trigger sense strand
  modified_base 2: mod_base = OTHER; note = "2'-hydroxy nucleoside"
  modified_base 4: mod_base = OTHER; note = "2'-hydroxy nucleoside"
  modified_base 6: mod_base = OTHER; note = "2'-deoxy-3'-fluoro nucleoside"
  modified_base 8: mod_base = OTHER; note = "2'-deoxy-3'-fluoro nucleoside"
  modified_base 10..11: mod_base = OTHER; note = "2'-deoxy-3'-fluoro nucleoside"
  modified_base 14: mod_base = OTHER; note = "2'-deoxy-3'-fluoro nucleoside"
  modified_base 16: mod_base = OTHER; note = "2'-deoxy-3'-fluoro nucleoside"
  modified_base 18: mod_base = OTHER; note = "2'-deoxy-3'-fluoro nucleoside"
  modified_base 20: mod_base = OTHER; note = "2'-deoxy-3'-fluoro nucleoside"
  modified_base 22: mod_base = OTHER; note = "2'-deoxy-3'-fluoro nucleoside"
  modified_base 24: mod_base = OTHER; note = "2'-deoxy-3'-fluoro nucleoside"
  modified_base 26: mod_base = OTHER; note = "2'-deoxy-3'-fluoro nucleoside"
  modified_base 1: mod_base = OTHER; note = "2'-O-Methyl nucleoside"
  modified_base 3: mod_base = OTHER; note = "2'-O-Methyl nucleoside"
  modified_base 5: mod_base = OTHER; note = "2'-O-Methyl nucleoside"
  modified_base 7: mod_base = OTHER; note = "2'-O-Methyl nucleoside"
  modified_base 9: mod_base = OTHER; note = "2'-O-Methyl nucleoside"
  modified_base 12..13: mod_base = OTHER; note = "2'-O-Methyl nucleoside"
  modified_base 15: mod_base = OTHER; note = "2'-O-Methyl nucleoside"
  modified_base 17: mod_base = OTHER; note = "2'-O-Methyl nucleoside"
  modified_base 19: mod_base = OTHER; note = "2'-O-Methyl nucleoside"
  modified_base 21: mod_base = OTHER; note = "2'-O-Methyl nucleoside"
  modified_base 23: mod_base = OTHER; note = "2'-O-Methyl nucleoside"
  modified_base 25: mod_base = OTHER; note = "2'-O-Methyl nucleoside"
  modified_base 6: mod_base = OTHER; note = "phosphorothioate linked nucleoside"
  modified_base 26: mod_base = OTHER; note = "C6-SS-Alk-Me modified nucleoside"
  source 1..26: mol_type = other RNA
tatatgtccgtgtgcacttcgcttca

SEQ ID NO: 513 - RNA, 26 nt, synthetic construct
  misc_feature 1..26: note = HBV RNAi trigger sense strand
  modified_base 2: mod_base = OTHER; note = "2'-hydroxy nucleoside"
  modified_base 4: mod_base = OTHER; note = "2'-hydroxy nucleoside"
  modified_base 6: mod_base = OTHER; note = "2'-deoxy-3'-fluoro nucleoside"
  modified_base 8: mod_base = OTHER; note = "2'-deoxy-3'-fluoro nucleoside"
  modified_base 10: mod_base = OTHER; note = "2'-deoxy-3'-fluoro nucleoside"
  modified_base 12: mod_base = OTHER; note = "2'-deoxy-3'-fluoro nucleoside"
  modified_base 15..16: mod_base = OTHER; note = "2'-deoxy-3'-fluoro nucleoside"
  modified_base 18: mod_base = OTHER; note = "2'-deoxy-3'-fluoro nucleoside"
  modified_base 20: mod_base = OTHER; note = "2'-deoxy-3'-fluoro nucleoside"
  modified_base 22: mod_base = OTHER; note = "2'-deoxy-3'-fluoro nucleoside"
  modified_base 24: mod_base = OTHER; note = "2'-deoxy-3'-fluoro nucleoside"
  modified_base 26: mod_base = OTHER; note = "2'-deoxy-3'-fluoro nucleoside"
  modified_base 1: mod_base = OTHER; note = "2'-O-Methyl nucleoside"
  modified_base 3: mod_base = OTHER; note = "2'-O-Methyl nucleoside"
  modified_base 5: mod_base = OTHER; note = "2'-O-Methyl nucleoside"
  modified_base 7: mod_base = OTHER; note = "2'-O-Methyl nucleoside"
  modified_base 9: mod_base = OTHER; note = "2'-O-Methyl nucleoside"
  modified_base 11: mod_base = OTHER; note = "2'-O-Methyl nucleoside"
  modified_base 13..14: mod_base = OTHER; note = "2'-O-Methyl nucleoside"
  modified_base 17: mod_base = OTHER; note = "2'-O-Methyl nucleoside"
  modified_base 19: mod_base = OTHER; note = "2'-O-Methyl nucleoside"
  modified_base 21: mod_base = OTHER; note = "2'-O-Methyl nucleoside"
  modified_base 23: mod_base = OTHER; note = "2'-O-Methyl nucleoside"
  modified_base 25: mod_base = OTHER; note = "2'-O-Methyl nucleoside"
  modified_base 6: mod_base = OTHER; note = "phosphorothioate linked nucleoside"
  modified_base 26: mod_base = OTHER; note = "C6-SS-Alk-Me modified nucleoside"
  source 1..26: mol_type = other RNA
tatatgcctgtaggcataaattggta

SEQ ID NO: 514 - RNA, 26 nt, synthetic construct
  misc_feature 1..26: note = HBV RNAi trigger sense strand
  modified_base 2: mod_base = OTHER; note = "2'-hydroxy nucleoside"
  modified_base 4: mod_base = OTHER; note = "2'-hydroxy nucleoside"
  modified_base 6: mod_base = OTHER; note = "2'-deoxy-3'-fluoro nucleoside"
  modified_base 8: mod_base = OTHER; note = "2'-deoxy-3'-fluoro nucleoside"
  modified_base 10: mod_base = OTHER; note = "2'-deoxy-3'-fluoro nucleoside"
  modified_base 12: mod_base = OTHER; note = "2'-deoxy-3'-fluoro nucleoside"
  modified_base 15..16: mod_base = OTHER; note = "2'-deoxy-3'-fluoro nucleoside"
  modified_base 18: mod_base = OTHER; note = "2'-deoxy-3'-fluoro nucleoside"
  modified_base 20: mod_base = OTHER; note = "2'-deoxy-3'-fluoro nucleoside"
  modified_base 22: mod_base = OTHER; note = "2'-deoxy-3'-fluoro nucleoside"
  modified_base 24: mod_base = OTHER; note = "2'-deoxy-3'-fluoro nucleoside"
  modified_base 26: mod_base = OTHER; note = "2'-deoxy-3'-fluoro nucleoside"
  modified_base 1: mod_base = OTHER; note = "2'-O-Methyl nucleoside"
  modified_base 3: mod_base = OTHER; note = "2'-O-Methyl nucleoside"
  modified_base 5: mod_base = OTHER; note = "2'-O-Methyl nucleoside"
  modified_base 7: mod_base = OTHER; note = "2'-O-Methyl nucleoside"
  modified_base 9: mod_base = OTHER; note = "2'-O-Methyl nucleoside"
  modified_base 11: mod_base = OTHER; note = "2'-O-Methyl nucleoside"
  modified_base 13..14: mod_base = OTHER; note = "2'-O-Methyl nucleoside"
  modified_base 17: mod_base = OTHER; note = "2'-O-Methyl nucleoside"
  modified_base 19: mod_base = OTHER; note = "2'-O-Methyl nucleoside"
  modified_base 21: mod_base = OTHER; note = "2'-O-Methyl nucleoside"
  modified_base 23: mod_base = OTHER; note = "2'-O-Methyl nucleoside"
  modified_base 25: mod_base = OTHER; note = "2'-O-Methyl nucleoside"
  modified_base 6: mod_base = OTHER; note = "phosphorothioate linked nucleoside"
  modified_base 26: mod_base = OTHER; note = "C11-PEG3-NAG3 modified nucleoside"
  source 1..26: mol_type = other RNA
tatatgcctgtaggcataaattggta

SEQ ID NO: 515 - RNA, 26 nt, synthetic construct
  misc_feature 1..26: note = HBV RNAi trigger sense strand
  modified_base 2: mod_base = OTHER; note = "2'-hydroxy nucleoside"
  modified_base 4: mod_base = OTHER; note = "2'-hydroxy nucleoside"
  modified_base 2: mod_base = OTHER; note = "2'-hydroxy nucleoside"
  modified_base 4: mod_base = OTHER; note = "2'-hydroxy nucleoside"
  modified_base 6: mod_base = OTHER; note = "2'-deoxy-3'-fluoro nucleoside"
  modified_base 8: mod_base = OTHER; note = "2'-deoxy-3'-fluoro nucleoside"
  modified_base 10..11: mod_base = OTHER; note = "2'-deoxy-3'-fluoro nucleoside"
  modified_base 14: mod_base = OTHER; note = "2'-deoxy-3'-fluoro nucleoside"
  modified_base 16: mod_base = OTHER; note = "2'-deoxy-3'-fluoro nucleoside"
  modified_base 18: mod_base = OTHER; note = "2'-deoxy-3'-fluoro nucleoside"
  modified_base 20: mod_base = OTHER; note = "2'-deoxy-3'-fluoro nucleoside"
  modified_base 22: mod_base = OTHER; note = "2'-deoxy-3'-fluoro nucleoside"
  modified_base 24: mod_base = OTHER; note = "2'-deoxy-3'-fluoro nucleoside"
  modified_base 26: mod_base = OTHER; note = "2'-deoxy-3'-fluoro nucleoside"
  modified_base 1: mod_base = OTHER; note = "2'-O-Methyl nucleoside"
  modified_base 3: mod_base = OTHER; note = "2'-O-Methyl nucleoside"
  modified_base 5: mod_base = OTHER; note = "2'-O-Methyl nucleoside"
  modified_base 7: mod_base = OTHER; note = "2'-O-Methyl nucleoside"
  modified_base 9: mod_base = OTHER; note = "2'-O-Methyl nucleoside"
  modified_base 12..13: mod_base = OTHER; note = "2'-O-Methyl nucleoside"
  modified_base 15: mod_base = OTHER; note = "2'-O-Methyl nucleoside"
  modified_base 17: mod_base = OTHER; note = "2'-O-Methyl nucleoside"
  modified_base 19: mod_base = OTHER; note = "2'-O-Methyl nucleoside"
  modified_base 21: mod_base = OTHER; note = "2'-O-Methyl nucleoside"
  modified_base 23: mod_base = OTHER; note = "2'-O-Methyl nucleoside"
  modified_base 25: mod_base = OTHER; note = "2'-O-Methyl nucleoside"
  modified_base 6: mod_base = OTHER; note = "phosphorothioate linked nucleoside"
  modified_base 26: mod_base = OTHER; note = "C6-SS-Alk-Me modified nucleoside"
  source 1..26: mol_type = other RNA
tatatgcctgtaggcataaattggta

SEQ ID NO: 516 - RNA, 26 nt, synthetic construct
  misc_feature 1..26: note = HBV RNAi trigger sense strand
  modified_base 2: mod_base = OTHER; note = "2'-hydroxy nucleoside"
  modified_base 4: mod_base = OTHER; note = "2'-hydroxy nucleoside"
  modified_base 6: mod_base = OTHER; note = "2'-deoxy-3'-fluoro nucleoside"
  modified_base 8: mod_base = OTHER; note = "2'-deoxy-3'-fluoro nucleoside"
  modified_base 10: mod_base = OTHER; note = "2'-deoxy-3'-fluoro nucleoside"
  modified_base 12: mod_base = OTHER; note = "2'-deoxy-3'-fluoro nucleoside"
  modified_base 15..16: mod_base = OTHER; note = "2'-deoxy-3'-fluoro nucleoside"
  modified_base 18: mod_base = OTHER; note = "2'-deoxy-3'-fluoro nucleoside"
  modified_base 20: mod_base = OTHER; note = "2'-deoxy-3'-fluoro nucleoside"
  modified_base 22: mod_base = OTHER; note = "2'-deoxy-3'-fluoro nucleoside"
  modified_base 24: mod_base = OTHER; note = "2'-deoxy-3'-fluoro nucleoside"
  modified_base 26: mod_base = OTHER; note = "2'-deoxy-3'-fluoro nucleoside"
  modified_base 1: mod_base = OTHER; note = "2'-O-Methyl nucleoside"
  modified_base 3: mod_base = OTHER; note = "2'-O-Methyl nucleoside"
  modified_base 5: mod_base = OTHER; note = "2'-O-Methyl nucleoside"
  modified_base 7: mod_base = OTHER; note = "2'-O-Methyl nucleoside"
  modified_base 9: mod_base = OTHER; note = "2'-O-Methyl nucleoside"
  modified_base 11: mod_base = OTHER; note = "2'-O-Methyl nucleoside"
  modified_base 13..14: mod_base = OTHER; note = "2'-O-Methyl nucleoside"
  modified_base 17: mod_base = OTHER; note = "2'-O-Methyl nucleoside"
  modified_base 19: mod_base = OTHER; note = "2'-O-Methyl nucleoside"
  modified_base 21: mod_base = OTHER; note = "2'-O-Methyl nucleoside"
  modified_base 23: mod_base = OTHER; note = "2'-O-Methyl nucleoside"
  modified_base 25: mod_base = OTHER; note = "2'-O-Methyl nucleoside"
  modified_base 6: mod_base = OTHER; note = "phosphorothioate linked nucleoside"
  modified_base 26: mod_base = OTHER; note = "C6-SS-Alk-Me modified nucleoside"
  source 1..26: mol_type = other RNA
tatattgtctgcggcgttttatcata

SEQ ID NO: 517 - RNA, 26 nt, synthetic construct
  misc_feature 1..26: note = HBV RNAi trigger sense strand
  modified_base 2: mod_base = OTHER; note = "2'-hydroxy nucleoside"
  modified_base 4: mod_base = OTHER; note = "2'-hydroxy nucleoside"
  modified_base 6: mod_base = OTHER; note = "2'-deoxy-3'-fluoro nucleoside"
  modified_base 8: mod_base = OTHER; note = "2'-deoxy-3'-fluoro nucleoside"
  modified_base 10: mod_base = OTHER; note = "2'-deoxy-3'-fluoro nucleoside"
  modified_base 12: mod_base = OTHER; note = "2'-deoxy-3'-fluoro nucleoside"
  modified_base 15..16: mod_base = OTHER; note = "2'-deoxy-3'-fluoro nucleoside"
  modified_base 18: mod_base = OTHER; note = "2'-deoxy-3'-fluoro nucleoside"
  modified_base 20: mod_base = OTHER; note = "2'-deoxy-3'-fluoro nucleoside"
  modified_base 22: mod_base = OTHER; note = "2'-deoxy-3'-fluoro nucleoside"
  modified_base 24: mod_base = OTHER; note = "2'-deoxy-3'-fluoro nucleoside"
  modified_base 26: mod_base = OTHER; note = "2'-deoxy-3'-fluoro nucleoside"
  modified_base 1: mod_base = OTHER; note = "2'-O-Methyl nucleoside"
  modified_base 3: mod_base = OTHER; note = "2'-O-Methyl nucleoside"
  modified_base 5: mod_base = OTHER; note = "2'-O-Methyl nucleoside"
  modified_base 7: mod_base = OTHER; note = "2'-O-Methyl nucleoside"
  modified_base 9: mod_base = OTHER; note = "2'-O-Methyl nucleoside"
  modified_base 11: mod_base = OTHER; note = "2'-O-Methyl nucleoside"
  modified_base 13..14: mod_base = OTHER; note = "2'-O-Methyl nucleoside"
  modified_base 17: mod_base = OTHER; note = "2'-O-Methyl nucleoside"
  modified_base 19: mod_base = OTHER; note = "2'-O-Methyl nucleoside"
  modified_base 21: mod_base = OTHER; note = "2'-O-Methyl nucleoside"
  modified_base 23: mod_base = OTHER; note = "2'-O-Methyl nucleoside"
  modified_base 25: mod_base = OTHER; note = "2'-O-Methyl nucleoside"
  modified_base 6: mod_base = OTHER; note = "phosphorothioate linked nucleoside"
  modified_base 26: mod_base = OTHER; note = "C11-PEG3-NAG3 modified nucleoside"
  source 1..26: mol_type = other RNA
tatattgtctgcggcgttttatcata

SEQ ID NO: 518 - RNA, 26 nt, synthetic construct
  misc_feature 1..26: note = HBV RNAi trigger sense strand
  modified_base 2: mod_base = OTHER; note = "2'-hydroxy nucleoside"
  modified_base 4: mod_base = OTHER; note = "2'-hydroxy nucleoside"
  modified_base 2: mod_base = OTHER; note = "2'-hydroxy nucleoside"
  modified_base 4: mod_base = OTHER; note = "2'-hydroxy nucleoside"
  modified_base 6: mod_base = OTHER; note = "2'-deoxy-3'-fluoro nucleoside"
  modified_base 8: mod_base = OTHER; note = "2'-deoxy-3'-fluoro nucleoside"
  modified_base 10..11: mod_base = OTHER; note = "2'-deoxy-3'-fluoro nucleoside"
  modified_base 14: mod_base = OTHER; note = "2'-deoxy-3'-fluoro nucleoside"
  modified_base 16: mod_base = OTHER; note = "2'-deoxy-3'-fluoro nucleoside"
  modified_base 18: mod_base = OTHER; note = "2'-deoxy-3'-fluoro nucleoside"
  modified_base 20: mod_base = OTHER; note = "2'-deoxy-3'-fluoro nucleoside"
  modified_base 22: mod_base = OTHER; note = "2'-deoxy-3'-fluoro nucleoside"
  modified_base 24: mod_base = OTHER; note = "2'-deoxy-3'-fluoro nucleoside"
  modified_base 26: mod_base = OTHER; note = "2'-deoxy-3'-fluoro nucleoside"
  modified_base 1: mod_base = OTHER; note = "2'-O-Methyl nucleoside"
  modified_base 3: mod_base = OTHER; note = "2'-O-Methyl nucleoside"
  modified_base 5: mod_base = OTHER; note = "2'-O-Methyl nucleoside"
  modified_base 7: mod_base = OTHER; note = "2'-O-Methyl nucleoside"
  modified_base 9: mod_base = OTHER; note = "2'-O-Methyl nucleoside"
  modified_base 12..13: mod_base = OTHER; note = "2'-O-Methyl nucleoside"
  modified_base 15: mod_base = OTHER; note = "2'-O-Methyl nucleoside"
  modified_base 17: mod_base = OTHER; note = "2'-O-Methyl nucleoside"
  modified_base 19: mod_base = OTHER; note = "2'-O-Methyl nucleoside"
  modified_base 21: mod_base = OTHER; note = "2'-O-Methyl nucleoside"
  modified_base 23: mod_base = OTHER; note = "2'-O-Methyl nucleoside"
  modified_base 25: mod_base = OTHER; note = "2'-O-Methyl nucleoside"
  modified_base 6: mod_base = OTHER; note = "phosphorothioate linked nucleoside"
  modified_base 26: mod_base = OTHER; note = "C6-SS-Alk-Me modified nucleoside"
  source 1..26: mol_type = other RNA
tatattgtctgcggcgttttatcata

SEQ ID NO: 519 - RNA, 26 nt, synthetic construct
  misc_feature 1..26: note = HBV RNAi trigger sense strand
  modified_base 2: mod_base = OTHER; note = "2'-hydroxy nucleoside"
  modified_base 4: mod_base = OTHER; note = "2'-hydroxy nucleoside"
  modified_base 6: mod_base = OTHER; note = "2'-deoxy-3'-fluoro nucleoside"
  modified_base 8: mod_base = OTHER; note = "2'-deoxy-3'-fluoro nucleoside"
  modified_base 10: mod_base = OTHER; note = "2'-deoxy-3'-fluoro nucleoside"
  modified_base 12: mod_base = OTHER; note = "2'-deoxy-3'-fluoro nucleoside"
  modified_base 15..16: mod_base = OTHER; note = "2'-deoxy-3'-fluoro nucleoside"
  modified_base 18: mod_base = OTHER; note = "2'-deoxy-3'-fluoro nucleoside"
  modified_base 20: mod_base = OTHER; note = "2'-deoxy-3'-fluoro nucleoside"
  modified_base 22: mod_base = OTHER; note = "2'-deoxy-3'-fluoro nucleoside"
  modified_base 24: mod_base = OTHER; note = "2'-deoxy-3'-fluoro nucleoside"
  modified_base 26: mod_base = OTHER; note = "2'-deoxy-3'-fluoro nucleoside"
  modified_base 1: mod_base = OTHER; note = "2'-O-Methyl nucleoside"
  modified_base 3: mod_base = OTHER; note = "2'-O-Methyl nucleoside"
  modified_base 5: mod_base = OTHER; note = "2'-O-Methyl nucleoside"
  modified_base 7: mod_base = OTHER; note = "2'-O-Methyl nucleoside"
  modified_base 9: mod_base = OTHER; note = "2'-O-Methyl nucleoside"
  modified_base 11: mod_base = OTHER; note = "2'-O-Methyl nucleoside"
  modified_base 13..14: mod_base = OTHER; note = "2'-O-Methyl nucleoside"
  modified_base 17: mod_base = OTHER; note = "2'-O-Methyl nucleoside"
  modified_base 19: mod_base = OTHER; note = "2'-O-Methyl nucleoside"
  modified_base 21: mod_base = OTHER; note = "2'-O-Methyl nucleoside"
  modified_base 23: mod_base = OTHER; note = "2'-O-Methyl nucleoside"
  modified_base 25: mod_base = OTHER; note = "2'-O-Methyl nucleoside"
  modified_base 6: mod_base = OTHER; note = "phosphorothioate linked nucleoside"
  modified_base 26: mod_base = OTHER; note = "C6-SS-Alk-Me modified nucleoside"
  source 1..26: mol_type = other RNA
tatatcaacctctgcctaatcatcta

SEQ ID NO: 520 - RNA, 26 nt, synthetic construct
  misc_feature 1..26: note = HBV RNAi trigger sense strand
  modified_base 2: mod_base = OTHER; note = "2'-hydroxy nucleoside"
  modified_base 4: mod_base = OTHER; note = "2'-hydroxy nucleoside"
  modified_base 6: mod_base = OTHER; note = "2'-deoxy-3'-fluoro nucleoside"
  modified_base 8: mod_base = OTHER; note = "2'-deoxy-3'-fluoro nucleoside"
  modified_base 10: mod_base = OTHER; note = "2'-deoxy-3'-fluoro nucleoside"
  modified_base 12: mod_base = OTHER; note = "2'-deoxy-3'-fluoro nucleoside"
  modified_base 15..16: mod_base = OTHER; note = "2'-deoxy-3'-fluoro nucleoside"
  modified_base 18: mod_base = OTHER; note = "2'-deoxy-3'-fluoro nucleoside"
  modified_base 20: mod_base = OTHER; note = "2'-deoxy-3'-fluoro nucleoside"
  modified_base 22: mod_base = OTHER; note = "2'-deoxy-3'-fluoro nucleoside"
  modified_base 24: mod_base = OTHER; note = "2'-deoxy-3'-fluoro nucleoside"
  modified_base 26: mod_base = OTHER; note = "2'-deoxy-3'-fluoro nucleoside"
  modified_base 1: mod_base = OTHER; note = "2'-O-Methyl nucleoside"
  modified_base 3: mod_base = OTHER; note = "2'-O-Methyl nucleoside"
  modified_base 5: mod_base = OTHER; note = "2'-O-Methyl nucleoside"
  modified_base 7: mod_base = OTHER; note = "2'-O-Methyl nucleoside"
  modified_base 9: mod_base = OTHER; note = "2'-O-Methyl nucleoside"
  modified_base 11: mod_base = OTHER; note = "2'-O-Methyl nucleoside"
  modified_base 13..14: mod_base = OTHER; note = "2'-O-Methyl nucleoside"
  modified_base 17: mod_base = OTHER; note = "2'-O-Methyl nucleoside"
  modified_base 19: mod_base = OTHER; note = "2'-O-Methyl nucleoside"
  modified_base 21: mod_base = OTHER; note = "2'-O-Methyl nucleoside"
  modified_base 23: mod_base = OTHER; note = "2'-O-Methyl nucleoside"
  modified_base 25: mod_base = OTHER; note = "2'-O-Methyl nucleoside"
  modified_base 6: mod_base = OTHER; note = "phosphorothioate linked nucleoside"
  modified_base 26: mod_base = OTHER; note = "C11-PEG3-NAG3 modified nucleoside"
  source 1..26: mol_type = other RNA
tatatcaacctctgcctaatcatcta

SEQ ID NO: 521 - RNA, 26 nt, synthetic construct
  misc_feature 1..26: note = HBV RNAi trigger sense strand
  modified_base 2: mod_base = OTHER; note = "2'-hydroxy nucleoside"
  modified_base 4: mod_base = OTHER; note = "2'-hydroxy nucleoside"
  modified_base 2: mod_base = OTHER; note = "2'-hydroxy nucleoside"
  modified_base 4: mod_base = OTHER; note = "2'-hydroxy nucleoside"
  modified_base 6: mod_base = OTHER; note = "2'-deoxy-3'-fluoro nucleoside"
  modified_base 8: mod_base = OTHER; note = "2'-deoxy-3'-fluoro nucleoside"
  modified_base 10..11: mod_base = OTHER; note = "2'-deoxy-3'-fluoro nucleoside"
  modified_base 14: mod_base = OTHER; note = "2'-deoxy-3'-fluoro nucleoside"
  modified_base 16: mod_base = OTHER; note = "2'-deoxy-3'-fluoro nucleoside"
  modified_base 18: mod_base = OTHER; note = "2'-deoxy-3'-fluoro nucleoside"
  modified_base 20: mod_base = OTHER; note = "2'-deoxy-3'-fluoro nucleoside"
  modified_base 22: mod_base = OTHER; note = "2'-deoxy-3'-fluoro nucleoside"
  modified_base 24: mod_base = OTHER; note = "2'-deoxy-3'-fluoro nucleoside"
  modified_base 26: mod_base = OTHER; note = "2'-deoxy-3'-fluoro nucleoside"
  modified_base 1: mod_base = OTHER; note = "2'-O-Methyl nucleoside"
  modified_base 3: mod_base = OTHER; note = "2'-O-Methyl nucleoside"
  modified_base 5: mod_base = OTHER; note = "2'-O-Methyl nucleoside"
  modified_base 7: mod_base = OTHER; note = "2'-O-Methyl nucleoside"
  modified_base 9: mod_base = OTHER; note = "2'-O-Methyl nucleoside"
  modified_base 12..13: mod_base = OTHER; note = "2'-O-Methyl nucleoside"
  modified_base 15: mod_base = OTHER; note = "2'-O-Methyl nucleoside"
  modified_base 17: mod_base = OTHER; note = "2'-O-Methyl nucleoside"
  modified_base 19: mod_base = OTHER; note = "2'-O-Methyl nucleoside"
  modified_base 21: mod_base = OTHER; note = "2'-O-Methyl nucleoside"
  modified_base 23: mod_base = OTHER; note = "2'-O-Methyl nucleoside"
  modified_base 25: mod_base = OTHER; note = "2'-O-Methyl nucleoside"
  modified_base 6: mod_base = OTHER; note = "phosphorothioate linked nucleoside"
  modified_base 26: mod_base = OTHER; note = "C6-SS-Alk-Me modified nucleoside"
  source 1..26: mol_type = other RNA
tatatcaacctctgcctaatcatcta

SEQ ID NO: 522 - RNA, 23 nt, synthetic construct
  modified_base 23: mod_base = OTHER; note = thymine
  misc_feature 1..23: note = HBV RNAi trigger sense strand
  modified_base 2: mod_base = OTHER; note = "2'-hydroxy nucleoside"
  modified_base 4: mod_base = OTHER; note = "2'-deoxy-3'-fluoro nucleoside"
  modified_base 6: mod_base = OTHER; note = "2'-deoxy-3'-fluoro nucleoside"
  modified_base 8: mod_base = OTHER; note = "2'-deoxy-3'-fluoro nucleoside"
  modified_base 10: mod_base = OTHER; note = "2'-deoxy-3'-fluoro nucleoside"
  modified_base 12: mod_base = OTHER; note = "2'-deoxy-3'-fluoro nucleoside"
  modified_base 14: mod_base = OTHER; note = "2'-deoxy-3'-fluoro nucleoside"
  modified_base 16: mod_base = OTHER; note = "2'-deoxy-3'-fluoro nucleoside"
  modified_base 18: mod_base = OTHER; note = "2'-deoxy-3'-fluoro nucleoside"
  modified_base 20: mod_base = OTHER; note = "2'-deoxy-3'-fluoro nucleoside"
  modified_base 22: mod_base = OTHER; note = "2'-deoxy-3'-fluoro nucleoside"
  modified_base 1: mod_base = OTHER; note = "2'-O-Methyl nucleoside"
  modified_base 3: mod_base = OTHER; note = "2'-O-Methyl nucleoside"
  modified_base 5: mod_base = OTHER; note = "2'-O-Methyl nucleoside"
  modified_base 7: mod_base = OTHER; note = "2'-O-Methyl nucleoside"
  modified_base 9: mod_base = OTHER; note = "2'-O-Methyl nucleoside"
  modified_base 11: mod_base = OTHER; note = "2'-O-Methyl nucleoside"
  modified_base 13: mod_base = OTHER; note = "2'-O-Methyl nucleoside"
  modified_base 15: mod_base = OTHER; note = "2'-O-Methyl nucleoside"
  modified_base 17: mod_base = OTHER; note = "2'-O-Methyl nucleoside"
  modified_base 19: mod_base = OTHER; note = "2'-O-Methyl nucleoside"
  modified_base 21: mod_base = OTHER; note = "2'-O-Methyl nucleoside"
  modified_base 23: mod_base = OTHER; note = "inverted nucleotide"
  modified_base 1: mod_base = OTHER; note = "Chol-TEG modifed nucleoside"
  modified_base 23: mod_base = OTHER; note = thymine
  source 1..23: mol_type = other RNA
tattgtctgcggcgttttatcat

SEQ ID NO: 523 - RNA, 23 nt, synthetic construct
  modified_base 23: mod_base = OTHER; note = thymine
  misc_feature 1..23: note = HBV RNAi trigger sense strand
  modified_base 2: mod_base = OTHER; note = "2'-hydroxy nucleoside"
  modified_base 4: mod_base = OTHER; note = "2'-deoxy-3'-fluoro nucleoside"
  modified_base 6: mod_base = OTHER; note = "2'-deoxy-3'-fluoro nucleoside"
  modified_base 8: mod_base = OTHER; note = "2'-deoxy-3'-fluoro nucleoside"
  modified_base 10: mod_base = OTHER; note = "2'-deoxy-3'-fluoro nucleoside"
  modified_base 12: mod_base = OTHER; note = "2'-deoxy-3'-fluoro nucleoside"
  modified_base 14: mod_base = OTHER; note = "2'-deoxy-3'-fluoro nucleoside"
  modified_base 16: mod_base = OTHER; note = "2'-deoxy-3'-fluoro nucleoside"
  modified_base 18: mod_base = OTHER; note = "2'-deoxy-3'-fluoro nucleoside"
  modified_base 20: mod_base = OTHER; note = "2'-deoxy-3'-fluoro nucleoside"
  modified_base 22: mod_base = OTHER; note = "2'-deoxy-3'-fluoro nucleoside"
  modified_base 1: mod_base = OTHER; note = "2'-O-Methyl nucleoside"
  modified_base 3: mod_base = OTHER; note = "2'-O-Methyl nucleoside"
  modified_base 5: mod_base = OTHER; note = "2'-O-Methyl nucleoside"
  modified_base 7: mod_base = OTHER; note = "2'-O-Methyl nucleoside"
  modified_base 9: mod_base = OTHER; note = "2'-O-Methyl nucleoside"
  modified_base 11: mod_base = OTHER; note = "2'-O-Methyl nucleoside"
  modified_base 13: mod_base = OTHER; note = "2'-O-Methyl nucleoside"
  modified_base 15: mod_base = OTHER; note = "2'-O-Methyl nucleoside"
  modified_base 17: mod_base = OTHER; note = "2'-O-Methyl nucleoside"
  modified_base 19: mod_base = OTHER; note = "2'-O-Methyl nucleoside"
  modified_base 21: mod_base = OTHER; note = "2'-O-Methyl nucleoside"
  modified_base 23: mod_base = OTHER; note = "inverted nucleotide"
  modified_base 1: mod_base = OTHER; note = "Chol-TEG modifed nucleoside"
  modified_base 23: mod_base = OTHER; note = thymine
  source 1..23: mol_type = other RNA
tattactagtgccatttgttcat

SEQ ID NO: 524 - RNA, 23 nt, synthetic construct
  modified_base 23: mod_base = OTHER; note = thymine
  misc_feature 1..23: note = HBV RNAi trigger sense strand
  modified_base 2: mod_base = OTHER; note = "2'-hydroxy nucleoside"
  modified_base 4: mod_base = OTHER; note = "2'-deoxy-3'-fluoro nucleoside"
  modified_base 6: mod_base = OTHER; note = "2'-deoxy-3'-fluoro nucleoside"
  modified_base 8: mod_base = OTHER; note = "2'-deoxy-3'-fluoro nucleoside"
  modified_base 10: mod_base = OTHER; note = "2'-deoxy-3'-fluoro nucleoside"
  modified_base 12: mod_base = OTHER; note = "2'-deoxy-3'-fluoro nucleoside"
  modified_base 14: mod_base = OTHER; note = "2'-deoxy-3'-fluoro nucleoside"
  modified_base 16: mod_base = OTHER; note = "2'-deoxy-3'-fluoro nucleoside"
  modified_base 18: mod_base = OTHER; note = "2'-deoxy-3'-fluoro nucleoside"
  modified_base 20: mod_base = OTHER; note = "2'-deoxy-3'-fluoro nucleoside"
  modified_base 22: mod_base = OTHER; note = "2'-deoxy-3'-fluoro nucleoside"
  modified_base 1: mod_base = OTHER; note = "2'-O-Methyl nucleoside"
  modified_base 3: mod_base = OTHER; note = "2'-O-Methyl nucleoside"
  modified_base 5: mod_base = OTHER; note = "2'-O-Methyl nucleoside"
  modified_base 7: mod_base = OTHER; note = "2'-O-Methyl nucleoside"
  modified_base 9: mod_base = OTHER; note = "2'-O-Methyl nucleoside"
  modified_base 11: mod_base = OTHER; note = "2'-O-Methyl nucleoside"
  modified_base 13: mod_base = OTHER; note = "2'-O-Methyl nucleoside"
  modified_base 15: mod_base = OTHER; note = "2'-O-Methyl nucleoside"
  modified_base 17: mod_base = OTHER; note = "2'-O-Methyl nucleoside"
  modified_base 19: mod_base = OTHER; note = "2'-O-Methyl nucleoside"
  modified_base 21: mod_base = OTHER; note = "2'-O-Methyl nucleoside"
  modified_base 23: mod_base = OTHER; note = "inverted nucleotide"
  modified_base 1: mod_base = OTHER; note = "Chol-TEG modifed nucleoside"
  modified_base 23: mod_base = OTHER; note = thymine
  source 1..23: mol_type = other RNA
tatccaagtgtttgctgacgcat

SEQ ID NO: 525 - RNA, 23 nt, synthetic construct
  modified_base 23: mod_base = OTHER; note = thymine
  misc_feature 1..23: note = HBV RNAi trigger sense strand
  modified_base 2: mod_base = OTHER; note = "2'-hydroxy nucleoside"
  modified_base 4: mod_base = OTHER; note = "2'-deoxy-3'-fluoro nucleoside"
  modified_base 6: mod_base = OTHER; note = "2'-deoxy-3'-fluoro nucleoside"
  modified_base 8: mod_base = OTHER; note = "2'-deoxy-3'-fluoro nucleoside"
  modified_base 10: mod_base = OTHER; note = "2'-deoxy-3'-fluoro nucleoside"
  modified_base 12: mod_base = OTHER; note = "2'-deoxy-3'-fluoro nucleoside"
  modified_base 14: mod_base = OTHER; note = "2'-deoxy-3'-fluoro nucleoside"
  modified_base 16: mod_base = OTHER; note = "2'-deoxy-3'-fluoro nucleoside"
  modified_base 18: mod_base = OTHER; note = "2'-deoxy-3'-fluoro nucleoside"
  modified_base 20: mod_base = OTHER; note = "2'-deoxy-3'-fluoro nucleoside"
  modified_base 22: mod_base = OTHER; note = "2'-deoxy-3'-fluoro nucleoside"
  modified_base 1: mod_base = OTHER; note = "2'-O-Methyl nucleoside"
  modified_base 3: mod_base = OTHER; note = "2'-O-Methyl nucleoside"
  modified_base 5: mod_base = OTHER; note = "2'-O-Methyl nucleoside"
  modified_base 7: mod_base = OTHER; note = "2'-O-Methyl nucleoside"
  modified_base 9: mod_base = OTHER; note = "2'-O-Methyl nucleoside"
  modified_base 11: mod_base = OTHER; note = "2'-O-Methyl nucleoside"
  modified_base 13: mod_base = OTHER; note = "2'-O-Methyl nucleoside"
  modified_base 15: mod_base = OTHER; note = "2'-O-Methyl nucleoside"
  modified_base 17: mod_base = OTHER; note = "2'-O-Methyl nucleoside"
  modified_base 19: mod_base = OTHER; note = "2'-O-Methyl nucleoside"
  modified_base 21: mod_base = OTHER; note = "2'-O-Methyl nucleoside"
  modified_base 23: mod_base = OTHER; note = "inverted nucleotide"
  modified_base 1: mod_base = OTHER; note = "Chol-TEG modifed nucleoside"
  modified_base 23: mod_base = OTHER; note = thymine
  source 1..23: mol_type = other RNA
tatccatttgttcagtggttcat

SEQ ID NO: 526 - RNA, 23 nt, synthetic construct
  modified_base 23: mod_base = OTHER; note = thymine
  misc_feature 1..23: note = HBV RNAi trigger sense strand
  modified_base 2: mod_base = OTHER; note = "2'-hydroxy nucleoside"
  modified_base 4: mod_base = OTHER; note = "2'-deoxy-3'-fluoro nucleoside"
  modified_base 6: mod_base = OTHER; note = "2'-deoxy-3'-fluoro nucleoside"
  modified_base 8: mod_base = OTHER; note = "2'-deoxy-3'-fluoro nucleoside"
  modified_base 10: mod_base = OTHER; note = "2'-deoxy-3'-fluoro nucleoside"
  modified_base 12: mod_base = OTHER; note = "2'-deoxy-3'-fluoro nucleoside"
  modified_base 14: mod_base = OTHER; note = "2'-deoxy-3'-fluoro nucleoside"
  modified_base 16: mod_base = OTHER; note = "2'-deoxy-3'-fluoro nucleoside"
  modified_base 18: mod_base = OTHER; note = "2'-deoxy-3'-fluoro nucleoside"
  modified_base 20: mod_base = OTHER; note = "2'-deoxy-3'-fluoro nucleoside"
  modified_base 22: mod_base = OTHER; note = "2'-deoxy-3'-fluoro nucleoside"
  modified_base 1: mod_base = OTHER; note = "2'-O-Methyl nucleoside"
  modified_base 3: mod_base = OTHER; note = "2'-O-Methyl nucleoside"
  modified_base 5: mod_base = OTHER; note = "2'-O-Methyl nucleoside"
  modified_base 7: mod_base = OTHER; note = "2'-O-Methyl nucleoside"
  modified_base 9: mod_base = OTHER; note = "2'-O-Methyl nucleoside"
  modified_base 11: mod_base = OTHER; note = "2'-O-Methyl nucleoside"
  modified_base 13: mod_base = OTHER; note = "2'-O-Methyl nucleoside"
  modified_base 15: mod_base = OTHER; note = "2'-O-Methyl nucleoside"
  modified_base 17: mod_base = OTHER; note = "2'-O-Methyl nucleoside"
  modified_base 19: mod_base = OTHER; note = "2'-O-Methyl nucleoside"
  modified_base 21: mod_base = OTHER; note = "2'-O-Methyl nucleoside"
  modified_base 23: mod_base = OTHER; note = "inverted nucleotide"
  modified_base 1: mod_base = OTHER; note = "Chol-TEG modifed nucleoside"
  modified_base 23: mod_base = OTHER; note = thymine
  source 1..23: mol_type = other RNA
tatcaaggtatgttgcccgttat

SEQ ID NO: 527 - RNA, 23 nt, synthetic construct
  modified_base 23: mod_base = OTHER; note = thymine
  misc_feature 1..23: note = HBV RNAi trigger sense strand
  modified_base 2: mod_base = OTHER; note = "2'-hydroxy nucleoside"
  modified_base 4: mod_base = OTHER; note = "2'-deoxy-3'-fluoro nucleoside"
  modified_base 6: mod_base = OTHER; note = "2'-deoxy-3'-fluoro nucleoside"
  modified_base 8: mod_base = OTHER; note = "2'-deoxy-3'-fluoro nucleoside"
  modified_base 10: mod_base = OTHER; note = "2'-deoxy-3'-fluoro nucleoside"
  modified_base 12: mod_base = OTHER; note = "2'-deoxy-3'-fluoro nucleoside"
  modified_base 14: mod_base = OTHER; note = "2'-deoxy-3'-fluoro nucleoside"
  modified_base 16: mod_base = OTHER; note = "2'-deoxy-3'-fluoro nucleoside"
  modified_base 18: mod_base = OTHER; note = "2'-deoxy-3'-fluoro nucleoside"
  modified_base 20: mod_base = OTHER; note = "2'-deoxy-3'-fluoro nucleoside"
  modified_base 22: mod_base = OTHER; note = "2'-deoxy-3'-fluoro nucleoside"
  modified_base 1: mod_base = OTHER; note = "2'-O-Methyl nucleoside"
  modified_base 3: mod_base = OTHER; note = "2'-O-Methyl nucleoside"
  modified_base 5: mod_base = OTHER; note = "2'-O-Methyl nucleoside"
  modified_base 7: mod_base = OTHER; note = "2'-O-Methyl nucleoside"
  modified_base 9: mod_base = OTHER; note = "2'-O-Methyl nucleoside"
  modified_base 11: mod_base = OTHER; note = "2'-O-Methyl nucleoside"
  modified_base 13: mod_base = OTHER; note = "2'-O-Methyl nucleoside"
  modified_base 15: mod_base = OTHER; note = "2'-O-Methyl nucleoside"
  modified_base 17: mod_base = OTHER; note = "2'-O-Methyl nucleoside"
  modified_base 19: mod_base = OTHER; note = "2'-O-Methyl nucleoside"
  modified_base 21: mod_base = OTHER; note = "2'-O-Methyl nucleoside"
  modified_base 23: mod_base = OTHER; note = "inverted nucleotide"
  modified_base 1: mod_base = OTHER; note = "Chol-TEG modifed nucleoside"
  modified_base 23: mod_base = OTHER; note = thymine
  source 1..23: mol_type = other RNA
tatctggctcagtttactagtat

SEQ ID NO: 528 - RNA, 23 nt, synthetic construct
  modified_base 23: mod_base = OTHER; note = thymine
  misc_feature 1..23: note = HBV RNAi trigger sense strand
  modified_base 2: mod_base = OTHER; note = "2'-hydroxy nucleoside"
  modified_base 4: mod_base = OTHER; note = "2'-deoxy-3'-fluoro nucleoside"
  modified_base 6: mod_base = OTHER; note = "2'-deoxy-3'-fluoro nucleoside"
  modified_base 8: mod_base = OTHER; note = "2'-deoxy-3'-fluoro nucleoside"
  modified_base 10: mod_base = OTHER; note = "2'-deoxy-3'-fluoro nucleoside"
  modified_base 12: mod_base = OTHER; note = "2'-deoxy-3'-fluoro nucleoside"
  modified_base 14: mod_base = OTHER; note = "2'-deoxy-3'-fluoro nucleoside"
  modified_base 16: mod_base = OTHER; note = "2'-deoxy-3'-fluoro nucleoside"
  modified_base 18: mod_base = OTHER; note = "2'-deoxy-3'-fluoro nucleoside"
  modified_base 20: mod_base = OTHER; note = "2'-deoxy-3'-fluoro nucleoside"
  modified_base 22: mod_base = OTHER; note = "2'-deoxy-3'-fluoro nucleoside"
  modified_base 1: mod_base = OTHER; note = "2'-O-Methyl nucleoside"
  modified_base 3: mod_base = OTHER; note = "2'-O-Methyl nucleoside"
  modified_base 5: mod_base = OTHER; note = "2'-O-Methyl nucleoside"
  modified_base 7: mod_base = OTHER; note = "2'-O-Methyl nucleoside"
  modified_base 9: mod_base = OTHER; note = "2'-O-Methyl nucleoside"
  modified_base 11: mod_base = OTHER; note = "2'-O-Methyl nucleoside"
  modified_base 13: mod_base = OTHER; note = "2'-O-Methyl nucleoside"
  modified_base 15: mod_base = OTHER; note = "2'-O-Methyl nucleoside"
  modified_base 17: mod_base = OTHER; note = "2'-O-Methyl nucleoside"
  modified_base 19: mod_base = OTHER; note = "2'-O-Methyl nucleoside"
  modified_base 21: mod_base = OTHER; note = "2'-O-Methyl nucleoside"
  modified_base 23: mod_base = OTHER; note = "inverted nucleotide"
  modified_base 1: mod_base = OTHER; note = "Chol-TEG modifed nucleoside"
  modified_base 23: mod_base = OTHER; note = thymine
  source 1..23: mol_type = other RNA
tattatgttgcccgtttgtccat

SEQ ID NO: 529 - RNA, 23 nt, synthetic construct
  modified_base 23: mod_base = OTHER; note = thymine
  misc_feature 1..23: note = HBV RNAi trigger sense strand
  modified_base 2: mod_base = OTHER; note = "2'-hydroxy nucleoside"
  modified_base 4: mod_base = OTHER; note = "2'-deoxy-3'-fluoro nucleoside"
  modified_base 6: mod_base = OTHER; note = "2'-deoxy-3'-fluoro nucleoside"
  modified_base 8: mod_base = OTHER; note = "2'-deoxy-3'-fluoro nucleoside"
  modified_base 10: mod_base = OTHER; note = "2'-deoxy-3'-fluoro nucleoside"
  modified_base 12: mod_base = OTHER; note = "2'-deoxy-3'-fluoro nucleoside"
  modified_base 14: mod_base = OTHER; note = "2'-deoxy-3'-fluoro nucleoside"
  modified_base 16: mod_base = OTHER; note = "2'-deoxy-3'-fluoro nucleoside"
  modified_base 18: mod_base = OTHER; note = "2'-deoxy-3'-fluoro nucleoside"
  modified_base 20: mod_base = OTHER; note = "2'-deoxy-3'-fluoro nucleoside"
  modified_base 22: mod_base = OTHER; note = "2'-deoxy-3'-fluoro nucleoside"
  modified_base 1: mod_base = OTHER; note = "2'-O-Methyl nucleoside"
  modified_base 3: mod_base = OTHER; note = "2'-O-Methyl nucleoside"
  modified_base 5: mod_base = OTHER; note = "2'-O-Methyl nucleoside"
  modified_base 7: mod_base = OTHER; note = "2'-O-Methyl nucleoside"
  modified_base 9: mod_base = OTHER; note = "2'-O-Methyl nucleoside"
  modified_base 11: mod_base = OTHER; note = "2'-O-Methyl nucleoside"
  modified_base 13: mod_base = OTHER; note = "2'-O-Methyl nucleoside"
  modified_base 15: mod_base = OTHER; note = "2'-O-Methyl nucleoside"
  modified_base 17: mod_base = OTHER; note = "2'-O-Methyl nucleoside"
  modified_base 19: mod_base = OTHER; note = "2'-O-Methyl nucleoside"
  modified_base 21: mod_base = OTHER; note = "2'-O-Methyl nucleoside"
  modified_base 23: mod_base = OTHER; note = "inverted nucleotide"
  modified_base 1: mod_base = OTHER; note = "Chol-TEG modifed nucleoside"
  modified_base 23: mod_base = OTHER; note = thymine
  source 1..23: mol_type = other RNA
tattcaaggtatgttgcccgtat

SEQ ID NO: 530 - RNA, 23 nt, synthetic construct
  modified_base 23: mod_base = OTHER; note = thymine
  misc_feature 1..23: note = HBV RNAi trigger sense strand
  modified_base 2: mod_base = OTHER; note = "2'-hydroxy nucleoside"
  modified_base 4: mod_base = OTHER; note = "2'-deoxy-3'-fluoro nucleoside"
  modified_base 6: mod_base = OTHER; note = "2'-deoxy-3'-fluoro nucleoside"
  modified_base 8: mod_base = OTHER; note = "2'-deoxy-3'-fluoro nucleoside"
  modified_base 10: mod_base = OTHER; note = "2'-deoxy-3'-fluoro nucleoside"
  modified_base 12: mod_base = OTHER; note = "2'-deoxy-3'-fluoro nucleoside"
  modified_base 14: mod_base = OTHER; note = "2'-deoxy-3'-fluoro nucleoside"
  modified_base 16: mod_base = OTHER; note = "2'-deoxy-3'-fluoro nucleoside"
  modified_base 18: mod_base = OTHER; note = "2'-deoxy-3'-fluoro nucleoside"
  modified_base 20: mod_base = OTHER; note = "2'-deoxy-3'-fluoro nucleoside"
  modified_base 22: mod_base = OTHER; note = "2'-deoxy-3'-fluoro nucleoside"
  modified_base 1: mod_base = OTHER; note = "2'-O-Methyl nucleoside"
  modified_base 3: mod_base = OTHER; note = "2'-O-Methyl nucleoside"
  modified_base 5: mod_base = OTHER; note = "2'-O-Methyl nucleoside"
  modified_base 7: mod_base = OTHER; note = "2'-O-Methyl nucleoside"
  modified_base 9: mod_base = OTHER; note = "2'-O-Methyl nucleoside"
  modified_base 11: mod_base = OTHER; note = "2'-O-Methyl nucleoside"
  modified_base 13: mod_base = OTHER; note = "2'-O-Methyl nucleoside"
  modified_base 15: mod_base = OTHER; note = "2'-O-Methyl nucleoside"
  modified_base 17: mod_base = OTHER; note = "2'-O-Methyl nucleoside"
  modified_base 19: mod_base = OTHER; note = "2'-O-Methyl nucleoside"
  modified_base 21: mod_base = OTHER; note = "2'-O-Methyl nucleoside"
  modified_base 23: mod_base = OTHER; note = "inverted nucleotide"
  modified_base 1: mod_base = OTHER; note = "Chol-TEG modifed nucleoside"
  modified_base 23: mod_base = OTHER; note = thymine
  source 1..23: mol_type = other RNA
tatccgtgtgcacttcgcttcat

SEQ ID NO: 531 - RNA, 23 nt, synthetic construct
  modified_base 23: mod_base = OTHER; note = thymine
  misc_feature 1..23: note = HBV RNAi trigger sense strand
  modified_base 2: mod_base = OTHER; note = "2'-hydroxy nucleoside"
  modified_base 4: mod_base = OTHER; note = "2'-deoxy-3'-fluoro nucleoside"
  modified_base 6: mod_base = OTHER; note = "2'-deoxy-3'-fluoro nucleoside"
  modified_base 8: mod_base = OTHER; note = "2'-deoxy-3'-fluoro nucleoside"
  modified_base 10: mod_base = OTHER; note = "2'-deoxy-3'-fluoro nucleoside"
  modified_base 12: mod_base = OTHER; note = "2'-deoxy-3'-fluoro nucleoside"
  modified_base 14: mod_base = OTHER; note = "2'-deoxy-3'-fluoro nucleoside"
  modified_base 16: mod_base = OTHER; note = "2'-deoxy-3'-fluoro nucleoside"
  modified_base 18: mod_base = OTHER; note = "2'-deoxy-3'-fluoro nucleoside"
  modified_base 20: mod_base = OTHER; note = "2'-deoxy-3'-fluoro nucleoside"
  modified_base 22: mod_base = OTHER; note = "2'-deoxy-3'-fluoro nucleoside"
  modified_base 1: mod_base = OTHER; note = "2'-O-Methyl nucleoside"
  modified_base 3: mod_base = OTHER; note = "2'-O-Methyl nucleoside"
  modified_base 5: mod_base = OTHER; note = "2'-O-Methyl nucleoside"
  modified_base 7: mod_base = OTHER; note = "2'-O-Methyl nucleoside"
  modified_base 9: mod_base = OTHER; note = "2'-O-Methyl nucleoside"
  modified_base 11: mod_base = OTHER; note = "2'-O-Methyl nucleoside"
  modified_base 13: mod_base = OTHER; note = "2'-O-Methyl nucleoside"
  modified_base 15: mod_base = OTHER; note = "2'-O-Methyl nucleoside"
  modified_base 17: mod_base = OTHER; note = "2'-O-Methyl nucleoside"
  modified_base 19: mod_base = OTHER; note = "2'-O-Methyl nucleoside"
  modified_base 21: mod_base = OTHER; note = "2'-O-Methyl nucleoside"
  modified_base 23: mod_base = OTHER; note = "inverted nucleotide"
  modified_base 1: mod_base = OTHER; note = "Chol-TEG modifed nucleoside"
  modified_base 23: mod_base = OTHER; note = thymine
  source 1..23: mol_type = other RNA
tatggcgctgaatcccgcggaat

SEQ ID NO: 532 - RNA, 26 nt, synthetic construct
  misc_feature 1..26: note = HBV RNAi trigger sense strand
  modified_base 2: mod_base = OTHER; note = "2'-hydroxy nucleoside"
  modified_base 4: mod_base = OTHER; note = "2'-hydroxy nucleoside"
  modified_base 6: mod_base = OTHER; note = "2'-deoxy-3'-fluoro nucleoside"
  modified_base 8: mod_base = OTHER; note = "2'-deoxy-3'-fluoro nucleoside"
  modified_base 10: mod_base = OTHER; note = "2'-deoxy-3'-fluoro nucleoside"
  modified_base 12: mod_base = OTHER; note = "2'-deoxy-3'-fluoro nucleoside"
  modified_base 14: mod_base = OTHER; note = "2'-deoxy-3'-fluoro nucleoside"
  modified_base 16: mod_base = OTHER; note = "2'-deoxy-3'-fluoro nucleoside"
  modified_base 18: mod_base = OTHER; note = "2'-deoxy-3'-fluoro nucleoside"
  modified_base 20: mod_base = OTHER; note = "2'-deoxy-3'-fluoro nucleoside"
  modified_base 22: mod_base = OTHER; note = "2'-deoxy-3'-fluoro nucleoside"
  modified_base 24: mod_base = OTHER; note = "2'-deoxy-3'-fluoro nucleoside"
  modified_base 1: mod_base = OTHER; note = "2'-O-Methyl nucleoside"
  modified_base 3: mod_base = OTHER; note = "2'-O-Methyl nucleoside"
  modified_base 5: mod_base = OTHER; note = "2'-O-Methyl nucleoside"
  modified_base 7: mod_base = OTHER; note = "2'-O-Methyl nucleoside"
  modified_base 9: mod_base = OTHER; note = "2'-O-Methyl nucleoside"
  modified_base 11: mod_base = OTHER; note = "2'-O-Methyl nucleoside"
  modified_base 13: mod_base = OTHER; note = "2'-O-Methyl nucleoside"
  modified_base 15: mod_base = OTHER; note = "2'-O-Methyl nucleoside"
  modified_base 17: mod_base = OTHER; note = "2'-O-Methyl nucleoside"
  modified_base 19: mod_base = OTHER; note = "2'-O-Methyl nucleoside"
  modified_base 21: mod_base = OTHER; note = "2'-O-Methyl nucleoside"
  modified_base 23: mod_base = OTHER; note = "2'-O-Methyl nucleoside"
  modified_base 25..26: mod_base = OTHER; note = "2'-O-Methyl nucleoside"
  modified_base 6..7: mod_base = OTHER; note = "phosphorothioate linked nucleoside"
  modified_base 26: mod_base = OTHER; note = "NAG13 modified nucleoside"
  source 1..26: mol_type = other RNA
tatattttactagtgccatttgttca

SEQ ID NO: 533 - RNA, 26 nt, synthetic construct
  misc_feature 1..26: note = HBV RNAi trigger sense strand
  modified_base 2: mod_base = OTHER; note = "2'-hydroxy nucleoside"
  modified_base 4: mod_base = OTHER; note = "2'-hydroxy nucleoside"
  modified_base 14: mod_base = OTHER; note = "2'-deoxy-3'-fluoro nucleoside"
  modified_base 16: mod_base = OTHER; note = "2'-deoxy-3'-fluoro nucleoside"
  modified_base 1: mod_base = OTHER; note = "2'-O-Methyl nucleoside"
  modified_base 3: mod_base = OTHER; note = "2'-O-Methyl nucleoside"
  modified_base 5..13: mod_base = OTHER; note = "2'-O-Methyl nucleoside"
  modified_base 15: mod_base = OTHER; note = "2'-O-Methyl nucleoside"
  modified_base 17..26: mod_base = OTHER; note = "2'-O-Methyl nucleoside"
  modified_base 6..7: mod_base = OTHER; note = "phosphorothioate linked nucleoside"
  modified_base 26: mod_base = OTHER; note = "NAG13 modified nucleoside"
  source 1..26: mol_type = other RNA
tatattttactagtgccatttgttca

SEQ ID NO: 534 - RNA, 26 nt, synthetic construct
  misc_feature 1..26: note = HBV RNAi trigger sense strand
  modified_base 2: mod_base = OTHER; note = "2'-hydroxy nucleoside"
  modified_base 4: mod_base = OTHER; note = "2'-hydroxy nucleoside"
  modified_base 10: mod_base = OTHER; note = "2'-deoxy-3'-fluoro nucleoside"
  modified_base 14: mod_base = OTHER; note = "2'-deoxy-3'-fluoro nucleoside"
  modified_base 16: mod_base = OTHER; note = "2'-deoxy-3'-fluoro nucleoside"
  modified_base 1: mod_base = OTHER; note = "2'-O-Methyl nucleoside"
  modified_base 3: mod_base = OTHER; note = "2'-O-Methyl nucleoside"
  modified_base 5..9: mod_base = OTHER; note = "2'-O-Methyl nucleoside"
  modified_base 11..13: mod_base = OTHER; note = "2'-O-Methyl nucleoside"
  modified_base 15: mod_base = OTHER; note = "2'-O-Methyl nucleoside"
  modified_base 17..26: mod_base = OTHER; note = "2'-O-Methyl nucleoside"
  modified_base 6..7: mod_base = OTHER; note = "phosphorothioate linked nucleoside"
  modified_base 26: mod_base = OTHER; note = "NAG13 modified nucleoside"
  source 1..26: mol_type = other RNA
tatattttactagtgccatttgttca

SEQ ID NO: 535 - RNA, 26 nt, synthetic construct
  misc_feature 1..26: note = HBV RNAi trigger sense strand
  modified_base 2: mod_base = OTHER; note = "2'-hydroxy nucleoside"
  modified_base 4: mod_base = OTHER; note = "2'-hydroxy nucleoside"
  modified_base 6: mod_base = OTHER; note = "2'-deoxy-3'-fluoro nucleoside"
  modified_base 8: mod_base = OTHER; note = "2'-deoxy-3'-fluoro nucleoside"
  modified_base 10: mod_base = OTHER; note = "2'-deoxy-3'-fluoro nucleoside"
  modified_base 12: mod_base = OTHER; note = "2'-deoxy-3'-fluoro nucleoside"
  modified_base 14: mod_base = OTHER; note = "2'-deoxy-3'-fluoro nucleoside"
  modified_base 16: mod_base = OTHER; note = "2'-deoxy-3'-fluoro nucleoside"
  modified_base 18: mod_base = OTHER; note = "2'-deoxy-3'-fluoro nucleoside"
  modified_base 20: mod_base = OTHER; note = "2'-deoxy-3'-fluoro nucleoside"
  modified_base 22: mod_base = OTHER; note = "2'-deoxy-3'-fluoro nucleoside"
  modified_base 24: mod_base = OTHER; note = "2'-deoxy-3'-fluoro nucleoside"
  modified_base 1: mod_base = OTHER; note = "2'-O-Methyl nucleoside"
  modified_base 3: mod_base = OTHER; note = "2'-O-Methyl nucleoside"
  modified_base 5: mod_base = OTHER; note = "2'-O-Methyl nucleoside"
  modified_base 7: mod_base = OTHER; note = "2'-O-Methyl nucleoside"
  modified_base 9: mod_base = OTHER; note = "2'-O-Methyl nucleoside"
  modified_base 11: mod_base = OTHER; note = "2'-O-Methyl nucleoside"
  modified_base 13: mod_base = OTHER; note = "2'-O-Methyl nucleoside"
  modified_base 15: mod_base = OTHER; note = "2'-O-Methyl nucleoside"
  modified_base 17: mod_base = OTHER; note = "2'-O-Methyl nucleoside"
  modified_base 19: mod_base = OTHER; note = "2'-O-Methyl nucleoside"
  modified_base 21: mod_base = OTHER; note = "2'-O-Methyl nucleoside"
  modified_base 23: mod_base = OTHER; note = "2'-O-Methyl nucleoside"
  modified_base 25..26: mod_base = OTHER; note = "2'-O-Methyl nucleoside"
  modified_base 6..7: mod_base = OTHER; note = "phosphorothioate linked nucleoside"
  modified_base 26: mod_base = OTHER; note = "NAG13 modified nucleoside"
  source 1..26: mol_type = other RNA
tatatggtatgttgcccgtttgtcca

SEQ ID NO: 536 - RNA, 26 nt, synthetic construct
  misc_feature 1..26: note = HBV RNAi trigger sense strand
  modified_base 2: mod_base = OTHER; note = "2'-hydroxy nucleoside"
  modified_base 4: mod_base = OTHER; note = "2'-hydroxy nucleoside"
  modified_base 14: mod_base = OTHER; note = "2'-deoxy-3'-fluoro nucleoside"
  modified_base 16: mod_base = OTHER; note = "2'-deoxy-3'-fluoro nucleoside"
  modified_base 24: mod_base = OTHER; note = "2'-deoxy-3'-fluoro nucleoside"
  modified_base 1: mod_base = OTHER; note = "2'-O-Methyl nucleoside"
  modified_base 3: mod_base = OTHER; note = "2'-O-Methyl nucleoside"
  modified_base 5..13: mod_base = OTHER; note = "2'-O-Methyl nucleoside"
  modified_base 15: mod_base = OTHER; note = "2'-O-Methyl nucleoside"
  modified_base 17..23: mod_base = OTHER; note = "2'-O-Methyl nucleoside"
  modified_base 25..26: mod_base = OTHER; note = "2'-O-Methyl nucleoside"
  modified_base 6..7: mod_base = OTHER; note = "phosphorothioate linked nucleoside"
  modified_base 26: mod_base = OTHER; note = "NAG13 modified nucleoside"
  source 1..26: mol_type = other RNA
tatatggtatgttgcccgtttgtcca

SEQ ID NO: 537 - RNA, 26 nt, synthetic construct
  misc_feature 1..26: note = HBV RNAi trigger sense strand
  modified_base 2: mod_base = OTHER; note = "2'-hydroxy nucleoside"
  modified_base 4: mod_base = OTHER; note = "2'-hydroxy nucleoside"
  modified_base 14: mod_base = OTHER; note = "2'-deoxy-3'-fluoro nucleoside"
  modified_base 16: mod_base = OTHER; note = "2'-deoxy-3'-fluoro nucleoside"
  modified_base 1: mod_base = OTHER; note = "2'-O-Methyl nucleoside"
  modified_base 3: mod_base = OTHER; note = "2'-O-Methyl nucleoside"
  modified_base 5..13: mod_base = OTHER; note = "2'-O-Methyl nucleoside"
  modified_base 15: mod_base = OTHER; note = "2'-O-Methyl nucleoside"
  modified_base 17..26: mod_base = OTHER; note = "2'-O-Methyl nucleoside"
  modified_base 6..7: mod_base = OTHER; note = "phosphorothioate linked nucleoside"
  modified_base 26: mod_base = OTHER; note = "NAG13 modified nucleoside"
  source 1..26: mol_type = other RNA
tatatggtatgttgcccgtttgtcca

SEQ ID NO: 538 - RNA, 26 nt, synthetic construct
  misc_feature 1..26: note = HBV RNAi trigger sense strand
  modified_base 2: mod_base = OTHER; note = "2'-hydroxy nucleoside"
  modified_base 4: mod_base = OTHER; note = "2'-hydroxy nucleoside"
  modified_base 6: mod_base = OTHER; note = "2'-deoxy-3'-fluoro nucleoside"
  modified_base 8: mod_base = OTHER; note = "2'-deoxy-3'-fluoro nucleoside"
  modified_base 10: mod_base = OTHER; note = "2'-deoxy-3'-fluoro nucleoside"
  modified_base 12: mod_base = OTHER; note = "2'-deoxy-3'-fluoro nucleoside"
  modified_base 14: mod_base = OTHER; note = "2'-deoxy-3'-fluoro nucleoside"
  modified_base 16: mod_base = OTHER; note = "2'-deoxy-3'-fluoro nucleoside"
  modified_base 18: mod_base = OTHER; note = "2'-deoxy-3'-fluoro nucleoside"
  modified_base 20: mod_base = OTHER; note = "2'-deoxy-3'-fluoro nucleoside"
  modified_base 22: mod_base = OTHER; note = "2'-deoxy-3'-fluoro nucleoside"
  modified_base 24: mod_base = OTHER; note = "2'-deoxy-3'-fluoro nucleoside"
  modified_base 1: mod_base = OTHER; note = "2'-O-Methyl nucleoside"
  modified_base 3: mod_base = OTHER; note = "2'-O-Methyl nucleoside"
  modified_base 5: mod_base = OTHER; note = "2'-O-Methyl nucleoside"
  modified_base 7: mod_base = OTHER; note = "2'-O-Methyl nucleoside"
  modified_base 9: mod_base = OTHER; note = "2'-O-Methyl nucleoside"
  modified_base 11: mod_base = OTHER; note = "2'-O-Methyl nucleoside"
  modified_base 13: mod_base = OTHER; note = "2'-O-Methyl nucleoside"
  modified_base 15: mod_base = OTHER; note = "2'-O-Methyl nucleoside"
  modified_base 17: mod_base = OTHER; note = "2'-O-Methyl nucleoside"
  modified_base 19: mod_base = OTHER; note = "2'-O-Methyl nucleoside"
  modified_base 21: mod_base = OTHER; note = "2'-O-Methyl nucleoside"
  modified_base 23: mod_base = OTHER; note = "2'-O-Methyl nucleoside"
  modified_base 25..26: mod_base = OTHER; note = "2'-O-Methyl nucleoside"
  modified_base 6..7: mod_base = OTHER; note = "phosphorothioate linked nucleoside"
  modified_base 26: mod_base = OTHER; note = "NAG13 modified nucleoside"
  source 1..26: mol_type = other RNA
tatatgtccgtgtgcacttcgcttca

SEQ ID NO: 539 - RNA, 26 nt, synthetic construct
  misc_feature 1..26: note = HBV RNAi trigger sense strand
  modified_base 2: mod_base = OTHER; note = "2'-hydroxy nucleoside"
  modified_base 4: mod_base = OTHER; note = "2'-hydroxy nucleoside"
  modified_base 8: mod_base = OTHER; note = "2'-deoxy-3'-fluoro nucleoside"
  modified_base 14: mod_base = OTHER; note = "2'-deoxy-3'-fluoro nucleoside"
  modified_base 16: mod_base = OTHER; note = "2'-deoxy-3'-fluoro nucleoside"
  modified_base 20: mod_base = OTHER; note = "2'-deoxy-3'-fluoro nucleoside"
  modified_base 22: mod_base = OTHER; note = "2'-deoxy-3'-fluoro nucleoside"
  modified_base 1: mod_base = OTHER; note = "2'-O-Methyl nucleoside"
  modified_base 3: mod_base = OTHER; note = "2'-O-Methyl nucleoside"
  modified_base 5..7: mod_base = OTHER; note = "2'-O-Methyl nucleoside"
  modified_base 9..13: mod_base = OTHER; note = "2'-O-Methyl nucleoside"
  modified_base 15: mod_base = OTHER; note = "2'-O-Methyl nucleoside"
  modified_base 17..19: mod_base = OTHER; note = "2'-O-Methyl nucleoside"
  modified_base 21: mod_base = OTHER; note = "2'-O-Methyl nucleoside"
  modified_base 23..26: mod_base = OTHER; note = "2'-O-Methyl nucleoside"
  modified_base 6..7: mod_base = OTHER; note = "phosphorothioate linked nucleoside"
  modified_base 26: mod_base = OTHER; note = "NAG13 modified nucleoside"
  source 1..26: mol_type = other RNA
tatatgtccgtgtgcacttcgcttca

SEQ ID NO: 540 - RNA, 26 nt, synthetic construct
  misc_feature 1..26: note = HBV RNAi trigger sense strand
  modified_base 2: mod_base = OTHER; note = "2'-hydroxy nucleoside"
  modified_base 4: mod_base = OTHER; note = "2'-hydroxy nucleoside"
  modified_base 14: mod_base = OTHER; note = "2'-deoxy-3'-fluoro nucleoside"
  modified_base 16: mod_base = OTHER; note = "2'-deoxy-3'-fluoro nucleoside"
  modified_base 1: mod_base = OTHER; note = "2'-O-Methyl nucleoside"
  modified_base 3: mod_base = OTHER; note = "2'-O-Methyl nucleoside"
  modified_base 5..13: mod_base = OTHER; note = "2'-O-Methyl nucleoside"
  modified_base 15: mod_base = OTHER; note = "2'-O-Methyl nucleoside"
  modified_base 17..26: mod_base = OTHER; note = "2'-O-Methyl nucleoside"
  modified_base 6..7: mod_base = OTHER; note = "phosphorothioate linked nucleoside"
  modified_base 26: mod_base = OTHER; note = "NAG13 modified nucleoside"
  source 1..26: mol_type = other RNA
tatatgtccgtgtgcacttcgcttca

SEQ ID NO: 541 - RNA, 26 nt, synthetic construct
  misc_feature 1..26: note = HBV RNAi trigger sense strand
  modified_base 2: mod_base = OTHER; note = "2'-hydroxy nucleoside"
  modified_base 4: mod_base = OTHER; note = "2'-hydroxy nucleoside"
  modified_base 6: mod_base = OTHER; note = "2'-deoxy-3'-fluoro nucleoside"
  modified_base 8: mod_base = OTHER; note = "2'-deoxy-3'-fluoro nucleoside"
  modified_base 10: mod_base = OTHER; note = "2'-deoxy-3'-fluoro nucleoside"
  modified_base 12: mod_base = OTHER; note = "2'-deoxy-3'-fluoro nucleoside"
  modified_base 14: mod_base = OTHER; note = "2'-deoxy-3'-fluoro nucleoside"
  modified_base 16: mod_base = OTHER; note = "2'-deoxy-3'-fluoro nucleoside"
  modified_base 18: mod_base = OTHER; note = "2'-deoxy-3'-fluoro nucleoside"
  modified_base 20: mod_base = OTHER; note = "2'-deoxy-3'-fluoro nucleoside"
  modified_base 22: mod_base = OTHER; note = "2'-deoxy-3'-fluoro nucleoside"
  modified_base 24: mod_base = OTHER; note = "2'-deoxy-3'-fluoro nucleoside"
  modified_base 1: mod_base = OTHER; note = "2'-O-Methyl nucleoside"
  modified_base 3: mod_base = OTHER; note = "2'-O-Methyl nucleoside"
  modified_base 5: mod_base = OTHER; note = "2'-O-Methyl nucleoside"
  modified_base 7: mod_base = OTHER; note = "2'-O-Methyl nucleoside"
  modified_base 9: mod_base = OTHER; note = "2'-O-Methyl nucleoside"
  modified_base 11: mod_base = OTHER; note = "2'-O-Methyl nucleoside"
  modified_base 13: mod_base = OTHER; note = "2'-O-Methyl nucleoside"
  modified_base 15: mod_base = OTHER; note = "2'-O-Methyl nucleoside"
  modified_base 17: mod_base = OTHER; note = "2'-O-Methyl nucleoside"
  modified_base 19: mod_base = OTHER; note = "2'-O-Methyl nucleoside"
  modified_base 21: mod_base = OTHER; note = "2'-O-Methyl nucleoside"
  modified_base 23: mod_base = OTHER; note = "2'-O-Methyl nucleoside"
  modified_base 25..26: mod_base = OTHER; note = "2'-O-Methyl nucleoside"
  modified_base 6..7: mod_base = OTHER; note = "phosphorothioate linked nucleoside"
  modified_base 26: mod_base = OTHER; note = "NAG13 modified nucleoside"
  source 1..26: mol_type = other RNA
tatatgcctgtaggcataaattggta

SEQ ID NO: 542 - RNA, 26 nt, synthetic construct
  misc_feature 1..26: note = HBV RNAi trigger sense strand
  modified_base 2: mod_base = OTHER; note = "2'-hydroxy nucleoside"
  modified_base 4: mod_base = OTHER; note = "2'-hydroxy nucleoside"
  modified_base 8: mod_base = OTHER; note = "2'-deoxy-3'-fluoro nucleoside"
  modified_base 14: mod_base = OTHER; note = "2'-deoxy-3'-fluoro nucleoside"
  modified_base 16: mod_base = OTHER; note = "2'-deoxy-3'-fluoro nucleoside"
  modified_base 1: mod_base = OTHER; note = "2'-O-Methyl nucleoside"
  modified_base 3: mod_base = OTHER; note = "2'-O-Methyl nucleoside"
  modified_base 5..7: mod_base = OTHER; note = "2'-O-Methyl nucleoside"
  modified_base 9..13: mod_base = OTHER; note = "2'-O-Methyl nucleoside"
  modified_base 15: mod_base = OTHER; note = "2'-O-Methyl nucleoside"
  modified_base 17..26: mod_base = OTHER; note = "2'-O-Methyl nucleoside"
  modified_base 6..7: mod_base = OTHER; note = "phosphorothioate linked nucleoside"
  modified_base 26: mod_base = OTHER; note = "NAG13 modified nucleoside"
  source 1..26: mol_type = other RNA
tatatgcctgtaggcataaattggta

SEQ ID NO: 543 - RNA, 26 nt, synthetic construct
  misc_feature 1..26: note = HBV RNAi trigger sense strand
  modified_base 2: mod_base = OTHER; note = "2'-hydroxy nucleoside"
  modified_base 4: mod_base = OTHER; note = "2'-hydroxy nucleoside"
  modified_base 14: mod_base = OTHER; note = "2'-deoxy-3'-fluoro nucleoside"
  modified_base 16: mod_base = OTHER; note = "2'-deoxy-3'-fluoro nucleoside"
  modified_base 1: mod_base = OTHER; note = "2'-O-Methyl nucleoside"
  modified_base 3: mod_base = OTHER; note = "2'-O-Methyl nucleoside"
  modified_base 5..13: mod_base = OTHER; note = "2'-O-Methyl nucleoside"
  modified_base 15: mod_base = OTHER; note = "2'-O-Methyl nucleoside"
  modified_base 17..26: mod_base = OTHER; note = "2'-O-Methyl nucleoside"
  modified_base 6..7: mod_base = OTHER; note = "phosphorothioate linked nucleoside"
  modified_base 26: mod_base = OTHER; note = "NAG13 modified nucleoside"
  source 1..26: mol_type = other RNA
tatatgcctgtaggcataaattggta

SEQ ID NO: 544 - RNA, 26 nt, synthetic construct
  misc_feature 1..26: note = HBV RNAi trigger sense strand
  modified_base 2: mod_base = OTHER; note = "2'-hydroxy nucleoside"
  modified_base 4: mod_base = OTHER; note = "2'-hydroxy nucleoside"
  modified_base 6: mod_base = OTHER; note = "2'-deoxy-3'-fluoro nucleoside"
  modified_base 8: mod_base = OTHER; note = "2'-deoxy-3'-fluoro nucleoside"
  modified_base 10: mod_base = OTHER; note = "2'-deoxy-3'-fluoro nucleoside"
  modified_base 12: mod_base = OTHER; note = "2'-deoxy-3'-fluoro nucleoside"
  modified_base 14: mod_base = OTHER; note = "2'-deoxy-3'-fluoro nucleoside"
  modified_base 16: mod_base = OTHER; note = "2'-deoxy-3'-fluoro nucleoside"
  modified_base 18: mod_base = OTHER; note = "2'-deoxy-3'-fluoro nucleoside"
  modified_base 20: mod_base = OTHER; note = "2'-deoxy-3'-fluoro nucleoside"
  modified_base 22: mod_base = OTHER; note = "2'-deoxy-3'-fluoro nucleoside"
  modified_base 24: mod_base = OTHER; note = "2'-deoxy-3'-fluoro nucleoside"
  modified_base 1: mod_base = OTHER; note = "2'-O-Methyl nucleoside"
  modified_base 3: mod_base = OTHER; note = "2'-O-Methyl nucleoside"
  modified_base 5: mod_base = OTHER; note = "2'-O-Methyl nucleoside"
  modified_base 7: mod_base = OTHER; note = "2'-O-Methyl nucleoside"
  modified_base 9: mod_base = OTHER; note = "2'-O-Methyl nucleoside"
  modified_base 11: mod_base = OTHER; note = "2'-O-Methyl nucleoside"
  modified_base 13: mod_base = OTHER; note = "2'-O-Methyl nucleoside"
  modified_base 15: mod_base = OTHER; note = "2'-O-Methyl nucleoside"
  modified_base 17: mod_base = OTHER; note = "2'-O-Methyl nucleoside"
  modified_base 19: mod_base = OTHER; note = "2'-O-Methyl nucleoside"
  modified_base 21: mod_base = OTHER; note = "2'-O-Methyl nucleoside"
  modified_base 23: mod_base = OTHER; note = "2'-O-Methyl nucleoside"
  modified_base 25..26: mod_base = OTHER; note = "2'-O-Methyl nucleoside"
  modified_base 6..7: mod_base = OTHER; note = "phosphorothioate linked nucleoside"
  modified_base 26: mod_base = OTHER; note = "NAG13 modified nucleoside"
  source 1..26: mol_type = other RNA
tatatcaacctctgcctaatcatcta

SEQ ID NO: 545 - RNA, 26 nt, synthetic construct
  misc_feature 1..26: note = HBV RNAi trigger sense strand
  modified_base 2: mod_base = OTHER; note = "2'-hydroxy nucleoside"
  modified_base 4: mod_base = OTHER; note = "2'-hydroxy nucleoside"
  modified_base 6: mod_base = OTHER; note = "2'-deoxy-3'-fluoro nucleoside"
  modified_base 10: mod_base = OTHER; note = "2'-deoxy-3'-fluoro nucleoside"
  modified_base 12: mod_base = OTHER; note = "2'-deoxy-3'-fluoro nucleoside"
  modified_base 14: mod_base = OTHER; note = "2'-deoxy-3'-fluoro nucleoside"
  modified_base 16: mod_base = OTHER; note = "2'-deoxy-3'-fluoro nucleoside"
  modified_base 24: mod_base = OTHER; note = "2'-deoxy-3'-fluoro nucleoside"
  modified_base 1: mod_base = OTHER; note = "2'-O-Methyl nucleoside"
  modified_base 3: mod_base = OTHER; note = "2'-O-Methyl nucleoside"
  modified_base 5: mod_base = OTHER; note = "2'-O-Methyl nucleoside"
  modified_base 7..9: mod_base = OTHER; note = "2'-O-Methyl nucleoside"
  modified_base 11: mod_base = OTHER; note = "2'-O-Methyl nucleoside"
  modified_base 13: mod_base = OTHER; note = "2'-O-Methyl nucleoside"
  modified_base 15: mod_base = OTHER; note = "2'-O-Methyl nucleoside"
  modified_base 17..23: mod_base = OTHER; note = "2'-O-Methyl nucleoside"
  modified_base 25..26: mod_base = OTHER; note = "2'-O-Methyl nucleoside"
  modified_base 6..7: mod_base = OTHER; note = "phosphorothioate linked nucleoside"
  modified_base 26: mod_base = OTHER; note = "NAG13 modified nucleoside"
  source 1..26: mol_type = other RNA
tatatcaacctctgcctaatcatcta

SEQ ID NO: 546 - RNA, 26 nt, synthetic construct
  misc_feature 1..26: note = HBV RNAi trigger sense strand
  modified_base 2: mod_base = OTHER; note = "2'-hydroxy nucleoside"
  modified_base 4: mod_base = OTHER; note = "2'-hydroxy nucleoside"
  modified_base 14: mod_base = OTHER; note = "2'-deoxy-3'-fluoro nucleoside"
  modified_base 16: mod_base = OTHER; note = "2'-deoxy-3'-fluoro nucleoside"
  modified_base 1: mod_base = OTHER; note = "2'-O-Methyl nucleoside"
  modified_base 3: mod_base = OTHER; note = "2'-O-Methyl nucleoside"
  modified_base 5..13: mod_base = OTHER; note = "2'-O-Methyl nucleoside"
  modified_base 15: mod_base = OTHER; note = "2'-O-Methyl nucleoside"
  modified_base 17..26: mod_base = OTHER; note = "2'-O-Methyl nucleoside"
  modified_base 6..7: mod_base = OTHER; note = "phosphorothioate linked nucleoside"
  modified_base 26: mod_base = OTHER; note = "NAG13 modified nucleoside"
  source 1..26: mol_type = other RNA
tatatcaacctctgcctaatcatcta

SEQ ID NO: 547 - RNA, 26 nt, synthetic construct
  misc_feature 1..26: note = HBV RNAi trigger sense strand
  modified_base 2: mod_base = OTHER; note = "2'-hydroxy nucleoside"
  modified_base 4: mod_base = OTHER; note = "2'-hydroxy nucleoside"
  modified_base 14..16: mod_base = OTHER; note = "2'-deoxy-3'-fluoro nucleoside"
  modified_base 1: mod_base = OTHER; note = "2'-O-Methyl nucleoside"
  modified_base 3: mod_base = OTHER; note = "2'-O-Methyl nucleoside"
  modified_base 5..13: mod_base = OTHER; note = "2'-O-Methyl nucleoside"
  modified_base 17..26: mod_base = OTHER; note = "2'-O-Methyl nucleoside"
  modified_base 6..7: mod_base = OTHER; note = "phosphorothioate linked nucleoside"
  modified_base 26: mod_base = OTHER; note = "NAG13 modified nucleoside"
  source 1..26: mol_type = other RNA
tatattttactagtgccatttgttca

SEQ ID NO: 548 - RNA, 26 nt, synthetic construct
  misc_feature 1..26: note = HBV RNAi trigger sense strand
  modified_base 2: mod_base = OTHER; note = "2'-hydroxy nucleoside"
  modified_base 4: mod_base = OTHER; note = "2'-hydroxy nucleoside"
  modified_base 14..16: mod_base = OTHER; note = "2'-deoxy-3'-fluoro nucleoside"
  modified_base 1: mod_base = OTHER; note = "2'-O-Methyl nucleoside"
  modified_base 3: mod_base = OTHER; note = "2'-O-Methyl nucleoside"
  modified_base 5..13: mod_base = OTHER; note = "2'-O-Methyl nucleoside"
  modified_base 17..26: mod_base = OTHER; note = "2'-O-Methyl nucleoside"
  modified_base 6..7: mod_base = OTHER; note = "phosphorothioate linked nucleoside"
  modified_base 26: mod_base = OTHER; note = "NAG13 modified nucleoside"
  source 1..26: mol_type = other RNA
tatatggtatgttgcccgtttgtcca

SEQ ID NO: 549 - RNA, 26 nt, synthetic construct
  misc_feature 1..26: note = HBV RNAi trigger sense strand
  modified_base 2: mod_base = OTHER; note = "2'-hydroxy nucleoside"
  modified_base 4: mod_base = OTHER; note = "2'-hydroxy nucleoside"
  modified_base 14..16: mod_base = OTHER; note = "2'-deoxy-3'-fluoro nucleoside"
  modified_base 1: mod_base = OTHER; note = "2'-O-Methyl nucleoside"
  modified_base 3: mod_base = OTHER; note = "2'-O-Methyl nucleoside"
  modified_base 5..13: mod_base = OTHER; note = "2'-O-Methyl nucleoside"
  modified_base 17..26: mod_base = OTHER; note = "2'-O-Methyl nucleoside"
  modified_base 6..7: mod_base = OTHER; note = "phosphorothioate linked nucleoside"
  modified_base 26: mod_base = OTHER; note = "NAG13 modified nucleoside"
  source 1..26: mol_type = other RNA
tatatgtccgtgtgcacttcgcttca

SEQ ID NO: 550 - RNA, 26 nt, synthetic construct
  misc_feature 1..26: note = HBV RNAi trigger sense strand
  modified_base 2: mod_base = OTHER; note = "2'-hydroxy nucleoside"
  modified_base 4: mod_base = OTHER; note = "2'-hydroxy nucleoside"
  modified_base 14..16: mod_base = OTHER; note = "2'-deoxy-3'-fluoro nucleoside"
  modified_base 1: mod_base = OTHER; note = "2'-O-Methyl nucleoside"
  modified_base 3: mod_base = OTHER; note = "2'-O-Methyl nucleoside"
  modified_base 5..13: mod_base = OTHER; note = "2'-O-Methyl nucleoside"
  modified_base 17..26: mod_base = OTHER; note = "2'-O-Methyl nucleoside"
  modified_base 6..7: mod_base = OTHER; note = "phosphorothioate linked nucleoside"
  modified_base 26: mod_base = OTHER; note = "NAG13 modified nucleoside"
  source 1..26: mol_type = other RNA
tatatgcctgtaggcataaattggta

SEQ ID NO: 551 - RNA, 26 nt, synthetic construct
  misc_feature 1..26: note = HBV RNAi trigger sense strand
  modified_base 2: mod_base = OTHER; note = "2'-hydroxy nucleoside"
  modified_base 4: mod_base = OTHER; note = "2'-hydroxy nucleoside"
  modified_base 14..16: mod_base = OTHER; note = "2'-deoxy-3'-fluoro nucleoside"
  modified_base 1: mod_base = OTHER; note = "2'-O-Methyl nucleoside"
  modified_base 3: mod_base = OTHER; note = "2'-O-Methyl nucleoside"
  modified_base 5..13: mod_base = OTHER; note = "2'-O-Methyl nucleoside"
  modified_base 17..26: mod_base = OTHER; note = "2'-O-Methyl nucleoside"
  modified_base 6..7: mod_base = OTHER; note = "phosphorothioate linked nucleoside"
  modified_base 26: mod_base = OTHER; note = "NAG13 modified nucleoside"
  source 1..26: mol_type = other RNA
tatatcaacctctgcctaatcatcta

SEQ ID NO: 552 - RNA, 26 nt, synthetic construct
  misc_feature 1..26: note = HBV RNAi trigger sense strand
  modified_base 2: mod_base = OTHER; note = "2'-hydroxy nucleoside"
  modified_base 4: mod_base = OTHER; note = "2'-hydroxy nucleoside"
  modified_base 14..16: mod_base = OTHER; note = "2'-deoxy-3'-fluoro nucleoside"
  modified_base 1: mod_base = OTHER; note = "2'-O-Methyl nucleoside"
  modified_base 3: mod_base = OTHER; note = "2'-O-Methyl nucleoside"
  modified_base 5..13: mod_base = OTHER; note = "2'-O-Methyl nucleoside"
  modified_base 17..26: mod_base = OTHER; note = "2'-O-Methyl nucleoside"
  modified_base 7..8: mod_base = OTHER; note = "phosphorothioate linked nucleoside"
  modified_base 26: mod_base = OTHER; note = "NAG13 modified nucleoside"
  source 1..26: mol_type = other RNA
tatattgtctgcggcgttttatcata

SEQ ID NO: 553 - RNA, 26 nt, synthetic construct
  misc_feature 1..26: note = HBV RNAi trigger sense strand
  modified_base 2: mod_base = OTHER; note = "2'-hydroxy nucleoside"
  modified_base 4: mod_base = OTHER; note = "2'-hydroxy nucleoside"
  modified_base 14: mod_base = OTHER; note = "2'-deoxy-3'-fluoro nucleoside"
  modified_base 16: mod_base = OTHER; note = "2'-deoxy-3'-fluoro nucleoside"
  modified_base 1: mod_base = OTHER; note = "2'-O-Methyl nucleoside"
  modified_base 3: mod_base = OTHER; note = "2'-O-Methyl nucleoside"
  modified_base 5..13: mod_base = OTHER; note = "2'-O-Methyl nucleoside"
  modified_base 15: mod_base = OTHER; note = "2'-O-Methyl nucleoside"
  modified_base 17..26: mod_base = OTHER; note = "2'-O-Methyl nucleoside"
  modified_base 7..8: mod_base = OTHER; note = "phosphorothioate linked nucleoside"
  modified_base 26: mod_base = OTHER; note = "NAG13 modified nucleoside"
  source 1..26: mol_type = other RNA
tatattgtctgcggcgttttatcata

SEQ ID NO: 554 - RNA, 26 nt, synthetic construct
  misc_feature 1..26: note = HBV RNAi trigger sense strand
  modified_base 2: mod_base = OTHER; note = "2'-hydroxy nucleoside"
  modified_base 4: mod_base = OTHER; note = "2'-hydroxy nucleoside"
  modified_base 14..16: mod_base = OTHER; note = "2'-deoxy-3'-fluoro nucleoside"
  modified_base 1: mod_base = OTHER; note = "2'-O-Methyl nucleoside"
  modified_base 3: mod_base = OTHER; note = "2'-O-Methyl nucleoside"
  modified_base 5..13: mod_base = OTHER; note = "2'-O-Methyl nucleoside"
  modified_base 17..26: mod_base = OTHER; note = "2'-O-Methyl nucleoside"
  modified_base 7..8: mod_base = OTHER; note = "phosphorothioate linked nucleoside"
  modified_base 26: mod_base = OTHER; note = "NAG13 modified nucleoside"
  source 1..26: mol_type = other RNA
tatattgtgtctgcggcgttttatca

SEQ ID NO: 555 - RNA, 26 nt, synthetic construct
  misc_feature 1..26: note = HBV RNAi trigger sense strand
  modified_base 2: mod_base = OTHER; note = "2'-hydroxy nucleoside"
  modified_base 4: mod_base = OTHER; note = "2'-hydroxy nucleoside"
  modified_base 14: mod_base = OTHER; note = "2'-deoxy-3'-fluoro nucleoside"
  modified_base 16: mod_base = OTHER; note = "2'-deoxy-3'-fluoro nucleoside"
  modified_base 1: mod_base = OTHER; note = "2'-O-Methyl nucleoside"
  modified_base 3: mod_base = OTHER; note = "2'-O-Methyl nucleoside"
  modified_base 5..13: mod_base = OTHER; note = "2'-O-Methyl nucleoside"
  modified_base 15: mod_base = OTHER; note = "2'-O-Methyl nucleoside"
  modified_base 17..26: mod_base = OTHER; note = "2'-O-Methyl nucleoside"
  modified_base 7..8: mod_base = OTHER; note = "phosphorothioate linked nucleoside"
  modified_base 26: mod_base = OTHER; note = "NAG13 modified nucleoside"
  source 1..26: mol_type = other RNA
tatattgtgtctgcggcgttttatca

SEQ ID NO: 556 - RNA, 23 nt, synthetic construct
  modified_base 23: mod_base = OTHER; note = thymine
  misc_feature 1..23: note = HBV RNAi trigger sense strand
  modified_base 2: mod_base = OTHER; note = "2'-hydroxy nucleoside"
  modified_base 4: mod_base = OTHER; note = "2'-deoxy-3'-fluoro nucleoside"
  modified_base 6: mod_base = OTHER; note = "2'-deoxy-3'-fluoro nucleoside"
  modified_base 8: mod_base = OTHER; note = "2'-deoxy-3'-fluoro nucleoside"
  modified_base 10..12: mod_base = OTHER; note = "2'-deoxy-3'-fluoro nucleoside"
  modified_base 14: mod_base = OTHER; note = "2'-deoxy-3'-fluoro nucleoside"
  modified_base 16: mod_base = OTHER; note = "2'-deoxy-3'-fluoro nucleoside"
  modified_base 18: mod_base = OTHER; note = "2'-deoxy-3'-fluoro nucleoside"
  modified_base 20: mod_base = OTHER; note = "2'-deoxy-3'-fluoro nucleoside"
  modified_base 22: mod_base = OTHER; note = "2'-deoxy-3'-fluoro nucleoside"
  modified_base 1: mod_base = OTHER; note = "2'-O-Methyl nucleoside"
  modified_base 3: mod_base = OTHER; note = "2'-O-Methyl nucleoside"
  modified_base 5: mod_base = OTHER; note = "2'-O-Methyl nucleoside"
  modified_base 7: mod_base = OTHER; note = "2'-O-Methyl nucleoside"
  modified_base 9: mod_base = OTHER; note = "2'-O-Methyl nucleoside"
  modified_base 13: mod_base = OTHER; note = "2'-O-Methyl nucleoside"
  modified_base 15: mod_base = OTHER; note = "2'-O-Methyl nucleoside"
  modified_base 17: mod_base = OTHER; note = "2'-O-Methyl nucleoside"
  modified_base 19: mod_base = OTHER; note = "2'-O-Methyl nucleoside"
  modified_base 21: mod_base = OTHER; note = "2'-O-Methyl nucleoside"
  modified_base 23: mod_base = OTHER; note = "inverted nucleotide"
  modified_base 23: mod_base = OTHER; note = "TEG-Biotin modified nucleoside"
  modified_base 1: mod_base = OTHER; note = "Chol-TEG modifed nucleoside"
  modified_base 23: mod_base = OTHER; note = thymine
  source 1..23: mol_type = other RNA
tattctgcggcgttttatcatat

SEQ ID NO: 557 - RNA, 23 nt, synthetic construct
  modified_base 23: mod_base = OTHER; note = thymine
  misc_feature 1..23: note = HBV RNAi trigger sense strand
  modified_base 2: mod_base = OTHER; note = "2'-hydroxy nucleoside"
  modified_base 4: mod_base = OTHER; note = "2'-deoxy-3'-fluoro nucleoside"
  modified_base 6: mod_base = OTHER; note = "2'-deoxy-3'-fluoro nucleoside"
  modified_base 8: mod_base = OTHER; note = "2'-deoxy-3'-fluoro nucleoside"
  modified_base 10..12: mod_base = OTHER; note = "2'-deoxy-3'-fluoro nucleoside"
  modified_base 14: mod_base = OTHER; note = "2'-deoxy-3'-fluoro nucleoside"
  modified_base 16: mod_base = OTHER; note = "2'-deoxy-3'-fluoro nucleoside"
  modified_base 18: mod_base = OTHER; note = "2'-deoxy-3'-fluoro nucleoside"
  modified_base 20: mod_base = OTHER; note = "2'-deoxy-3'-fluoro nucleoside"
  modified_base 22: mod_base = OTHER; note = "2'-deoxy-3'-fluoro nucleoside"
  modified_base 1: mod_base = OTHER; note = "2'-O-Methyl nucleoside"
  modified_base 3: mod_base = OTHER; note = "2'-O-Methyl nucleoside"
  modified_base 5: mod_base = OTHER; note = "2'-O-Methyl nucleoside"
  modified_base 7: mod_base = OTHER; note = "2'-O-Methyl nucleoside"
  modified_base 9: mod_base = OTHER; note = "2'-O-Methyl nucleoside"
  modified_base 13: mod_base = OTHER; note = "2'-O-Methyl nucleoside"
  modified_base 15: mod_base = OTHER; note = "2'-O-Methyl nucleoside"
  modified_base 17: mod_base = OTHER; note = "2'-O-Methyl nucleoside"
  modified_base 19: mod_base = OTHER; note = "2'-O-Methyl nucleoside"
  modified_base 21: mod_base = OTHER; note = "2'-O-Methyl nucleoside"
  modified_base 23: mod_base = OTHER; note = "inverted nucleotide"
  modified_base 23: mod_base = OTHER; note = "TEG-Biotin modified nucleoside"
  modified_base 1: mod_base = OTHER; note = "Chol-C6 modified nucleoside"
  modified_base 23: mod_base = OTHER; note = thymine
  source 1..23: mol_type = other RNA
tatctgtaggcataaattggtat

SEQ ID NO: 558 - RNA, 26 nt, synthetic construct
  modified_base 26: mod_base = OTHER; note = thymine
  misc_feature 1..26: note = HBV RNAi trigger sense strand
  modified_base 14..16: mod_base = OTHER; note = "2'-deoxy-3'-fluoro nucleoside"
  modified_base 1..13: mod_base = OTHER; note = "2'-O-Methyl nucleoside"
  modified_base 17..25: mod_base = OTHER; note = "2'-O-Methyl nucleoside"
  modified_base 26: mod_base = OTHER; note = "inverted nucleotide"
  modified_base 6..7: mod_base = OTHER; note = "phosphorothioate linked nucleoside"
  modified_base 26: mod_base = OTHER; note = "NAG13 modified nucleoside"
  modified_base 26: mod_base = OTHER; note = thymine
  source 1..26: mol_type = other RNA
tatatcggcgctgaatcccgcggact

SEQ ID NO: 559 - RNA, 26 nt, synthetic construct
  misc_feature 1..26: note = HBV RNAi trigger sense strand
  modified_base 14..16: mod_base = OTHER; note = "2'-deoxy-3'-fluoro nucleoside"
  modified_base 1..13: mod_base = OTHER; note = "2'-O-Methyl nucleoside"
  modified_base 17..25: mod_base = OTHER; note = "2'-O-Methyl nucleoside"
  modified_base 26: mod_base = OTHER; note = "inverted nucleotide"
  modified_base 6..7: mod_base = OTHER; note = "phosphorothioate linked nucleoside"
  modified_base 26: mod_base = OTHER; note = "NAG13 modified nucleoside"
  source 1..26: mol_type = other RNA
tatataccgggcgcacctctctttaa

SEQ ID NO: 560 - RNA, 26 nt, synthetic construct
  misc_feature 1..26: note = HBV RNAi trigger sense strand
  modified_base 14..16: mod_base = OTHER; note = "2'-deoxy-3'-fluoro nucleoside"
  modified_base 1..13: mod_base = OTHER; note = "2'-O-Methyl nucleoside"
  modified_base 17..25: mod_base = OTHER; note = "2'-O-Methyl nucleoside"
  modified_base 26: mod_base = OTHER; note = "inverted nucleotide"
  modified_base 6..7: mod_base = OTHER; note = "phosphorothioate linked nucleoside"
  modified_base 26: mod_base = OTHER; note = "NAG13 modified nucleoside"
  source 1..26: mol_type = other RNA
tatatggaccgtgtgcacttcgctta

SEQ ID NO: 561 - RNA, 26 nt, synthetic construct
  misc_feature 1..26: note = HBV RNAi trigger sense strand
  modified_base 14..16: mod_base = OTHER; note = "2'-deoxy-3'-fluoro nucleoside"
  modified_base 1..13: mod_base = OTHER; note = "2'-O-Methyl nucleoside"
  modified_base 17..25: mod_base = OTHER; note = "2'-O-Methyl nucleoside"
  modified_base 26: mod_base = OTHER; note = "inverted nucleotide"
  modified_base 6..7: mod_base = OTHER; note = "phosphorothioate linked nucleoside"
  modified_base 26: mod_base = OTHER; note = "NAG13 modified nucleoside"
  source 1..26: mol_type = other RNA
tatattccgtgtgcacttcgcttcaa

SEQ ID NO: 562 - RNA, 26 nt, synthetic construct
  modified_base 26: mod_base = OTHER; note = thymine
  misc_feature 1..26: note = HBV RNAi trigger sense strand
  modified_base 14..16: mod_base = OTHER; note = "2'-deoxy-3'-fluoro nucleoside"
  modified_base 1..13: mod_base = OTHER; note = "2'-O-Methyl nucleoside"
  modified_base 17..25: mod_base = OTHER; note = "2'-O-Methyl nucleoside"
  modified_base 26: mod_base = OTHER; note = "inverted nucleotide"
  modified_base 6..7: mod_base = OTHER; note = "phosphorothioate linked nucleoside"
  modified_base 26: mod_base = OTHER; note = "NAG13 modified nucleoside"
  modified_base 26: mod_base = OTHER; note = thymine
  source 1..26: mol_type = other RNA
tatatccgtgtgcacttcgcttcact

SEQ ID NO: 563 - RNA, 26 nt, synthetic construct
  misc_feature 1..26: note = HBV RNAi trigger sense strand
  modified_base 14..16: mod_base = OTHER; note = "2'-deoxy-3'-fluoro nucleoside"
  modified_base 1..13: mod_base = OTHER; note = "2'-O-Methyl nucleoside"
  modified_base 17..25: mod_base = OTHER; note = "2'-O-Methyl nucleoside"
  modified_base 26: mod_base = OTHER; note = "inverted nucleotide"
  modified_base 6..7: mod_base = OTHER; note = "phosphorothioate linked nucleoside"
  modified_base 26: mod_base = OTHER; note = "NAG13 modified nucleoside"
  source 1..26: mol_type = other RNA
tatatgtgcacttcgcttcacctcta

SEQ ID NO: 564 - RNA, 26 nt, synthetic construct
  misc_feature 1..26: note = HBV RNAi trigger sense strand
  modified_base 14..16: mod_base = OTHER; note = "2'-deoxy-3'-fluoro nucleoside"
  modified_base 1..13: mod_base = OTHER; note = "2'-O-Methyl nucleoside"
  modified_base 17..25: mod_base = OTHER; note = "2'-O-Methyl nucleoside"
  modified_base 26: mod_base = OTHER; note = "inverted nucleotide"
  modified_base 6..7: mod_base = OTHER; note = "phosphorothioate linked nucleoside"
  modified_base 26: mod_base = OTHER; note = "NAG13 modified nucleoside"
  source 1..26: mol_type = other RNA
tatattgcacttcgcttcacctctga

SEQ ID NO: 565 - RNA, 26 nt, synthetic construct
  misc_feature 1..26: note = HBV RNAi trigger sense strand
  modified_base 14..16: mod_base = OTHER; note = "2'-deoxy-3'-fluoro nucleoside"
  modified_base 1..13: mod_base = OTHER; note = "2'-O-Methyl nucleoside"
  modified_base 17..25: mod_base = OTHER; note = "2'-O-Methyl nucleoside"
  modified_base 26: mod_base = OTHER; note = "inverted nucleotide"
  modified_base 6..7: mod_base = OTHER; note = "phosphorothioate linked nucleoside"
  modified_base 26: mod_base = OTHER; note = "NAG13 modified nucleoside"
  source 1..26: mol_type = other RNA
tatatgcacttcgcttcacctctgca

SEQ ID NO: 566 - RNA, 26 nt, synthetic construct
  misc_feature 1..26: note = HBV RNAi trigger sense strand
  modified_base 14..16: mod_base = OTHER; note = "2'-deoxy-3'-fluoro nucleoside"
  modified_base 1..13: mod_base = OTHER; note = "2'-O-Methyl nucleoside"
  modified_base 17..25: mod_base = OTHER; note = "2'-O-Methyl nucleoside"
  modified_base 26: mod_base = OTHER; note = "inverted nucleotide"
  modified_base 6..7: mod_base = OTHER; note = "phosphorothioate linked nucleoside"
  modified_base 26: mod_base = OTHER; note = "NAG13 modified nucleoside"
  source 1..26: mol_type = other RNA
tatatcccagcaatgtcaacgaccga

SEQ ID NO: 567 - RNA, 26 nt, synthetic construct
  misc_feature 1..26: note = HBV RNAi trigger sense strand
  modified_base 14..16: mod_base = OTHER; note = "2'-deoxy-3'-fluoro nucleoside"
  modified_base 1..13: mod_base = OTHER; note = "2'-O-Methyl nucleoside"
  modified_base 17..25: mod_base = OTHER; note = "2'-O-Methyl nucleoside"
  modified_base 26: mod_base = OTHER; note = "inverted nucleotide"
  modified_base 6..7: mod_base = OTHER; note = "phosphorothioate linked nucleoside"
  modified_base 26: mod_base = OTHER; note = "NAG13 modified nucleoside"
  source 1..26: mol_type = other RNA
tatataatgtcaacgaccgaccttga

SEQ ID NO: 568 - RNA, 26 nt, synthetic construct
  misc_feature 1..26: note = HBV RNAi trigger sense strand
  modified_base 14..16: mod_base = OTHER; note = "2'-deoxy-3'-fluoro nucleoside"
  modified_base 1..13: mod_base = OTHER; note = "2'-O-Methyl nucleoside"
  modified_base 17..25: mod_base = OTHER; note = "2'-O-Methyl nucleoside"
  modified_base 26: mod_base = OTHER; note = "inverted nucleotide"
  modified_base 6..7: mod_base = OTHER; note = "phosphorothioate linked nucleoside"
  modified_base 26: mod_base = OTHER; note = "NAG13 modified nucleoside"
  source 1..26: mol_type = other RNA
tatataggagattaggttaaaggtca

SEQ ID NO: 569 - RNA, 26 nt, synthetic construct
  modified_base 26: mod_base = OTHER; note = thymine
  misc_feature 1..26: note = HBV RNAi trigger sense strand
  modified_base 14..16: mod_base = OTHER; note = "2'-deoxy-3'-fluoro nucleoside"
  modified_base 1..13: mod_base = OTHER; note = "2'-O-Methyl nucleoside"
  modified_base 17..25: mod_base = OTHER; note = "2'-O-Methyl nucleoside"
  modified_base 26: mod_base = OTHER; note = "inverted nucleotide"
  modified_base 6..7: mod_base = OTHER; note = "phosphorothioate linked nucleoside"
  modified_base 26: mod_base = OTHER; note = "NAG13 modified nucleoside"
  modified_base 26: mod_base = OTHER; note = thymine
  source 1..26: mol_type = other RNA
tatattaggaggctgtaggcataaat

SEQ ID NO: 570 - RNA, 26 nt, synthetic construct
  modified_base 26: mod_base = OTHER; note = thymine
  misc_feature 1..26: note = HBV RNAi trigger sense strand
  modified_base 14..16: mod_base = OTHER; note = "2'-deoxy-3'-fluoro nucleoside"
  modified_base 1..13: mod_base = OTHER; note = "2'-O-Methyl nucleoside"
  modified_base 17..25: mod_base = OTHER; note = "2'-O-Methyl nucleoside"
  modified_base 26: mod_base = OTHER; note = "inverted nucleotide"
  modified_base 6..7: mod_base = OTHER; note = "phosphorothioate linked nucleoside"
  modified_base 26: mod_base = OTHER; note = "NAG13 modified nucleoside"
  modified_base 26: mod_base = OTHER; note = thymine
  source 1..26: mol_type = other RNA
tatataggaggctgtaggcataaatt

SEQ ID NO: 571 - RNA, 26 nt, synthetic construct
  misc_feature 1..26: note = HBV RNAi trigger sense strand
  modified_base 14..16: mod_base = OTHER; note = "2'-deoxy-3'-fluoro nucleoside"
  modified_base 1..13: mod_base = OTHER; note = "2'-O-Methyl nucleoside"
  modified_base 17..25: mod_base = OTHER; note = "2'-O-Methyl nucleoside"
  modified_base 26: mod_base = OTHER; note = "inverted nucleotide"
  modified_base 6..7: mod_base = OTHER; note = "phosphorothioate linked nucleoside"
  modified_base 26: mod_base = OTHER; note = "NAG13 modified nucleoside"
  source 1..26: mol_type = other RNA
tatatggaggctgtaggcataaatta

SEQ ID NO: 572 - RNA, 26 nt, synthetic construct
  misc_feature 1..26: note = HBV RNAi trigger sense strand
  modified_base 14..16: mod_base = OTHER; note = "2'-deoxy-3'-fluoro nucleoside"
  modified_base 1..13: mod_base = OTHER; note = "2'-O-Methyl nucleoside"
  modified_base 17..25: mod_base = OTHER; note = "2'-O-Methyl nucleoside"
  modified_base 26: mod_base = OTHER; note = "inverted nucleotide"
  modified_base 6..7: mod_base = OTHER; note = "phosphorothioate linked nucleoside"
  modified_base 26: mod_base = OTHER; note = "NAG13 modified nucleoside"
  source 1..26: mol_type = other RNA
tatatgaggctgtaggcataaattga

SEQ ID NO: 573 - RNA, 26 nt, synthetic construct
  misc_feature 1..26: note = HBV RNAi trigger sense strand
  modified_base 14..16: mod_base = OTHER; note = "2'-deoxy-3'-fluoro nucleoside"
  modified_base 1..13: mod_base = OTHER; note = "2'-O-Methyl nucleoside"
  modified_base 17..25: mod_base = OTHER; note = "2'-O-Methyl nucleoside"
  modified_base 26: mod_base = OTHER; note = "inverted nucleotide"
  modified_base 6..7: mod_base = OTHER; note = "phosphorothioate linked nucleoside"
  modified_base 26: mod_base = OTHER; note = "NAG13 modified nucleoside"
  source 1..26: mol_type = other RNA
tatataggctgtaggcataaattgga

SEQ ID NO: 574 - RNA, 26 nt, synthetic construct
  misc_feature 1..26: note = HBV RNAi trigger sense strand
  modified_base 14..16: mod_base = OTHER; note = "2'-deoxy-3'-fluoro nucleoside"
  modified_base 1..13: mod_base = OTHER; note = "2'-O-Methyl nucleoside"
  modified_base 17..25: mod_base = OTHER; note = "2'-O-Methyl nucleoside"
  modified_base 26: mod_base = OTHER; note = "inverted nucleotide"
  modified_base 6..7: mod_base = OTHER; note = "phosphorothioate linked nucleoside"
  modified_base 26: mod_base = OTHER; note = "NAG13 modified nucleoside"
  source 1..26: mol_type = other RNA
tatatgctggatgtgtctgcggcgta

SEQ ID NO: 575 - RNA, 26 nt, synthetic construct
  misc_feature 1..26: note = HBV RNAi trigger sense strand
  modified_base 14..16: mod_base = OTHER; note = "2'-deoxy-3'-fluoro nucleoside"
  modified_base 1..13: mod_base = OTHER; note = "2'-O-Methyl nucleoside"
  modified_base 17..25: mod_base = OTHER; note = "2'-O-Methyl nucleoside"
  modified_base 26: mod_base = OTHER; note = "inverted nucleotide"
  modified_base 6..7: mod_base = OTHER; note = "phosphorothioate linked nucleoside"
  modified_base 26: mod_base = OTHER; note = "NAG13 modified nucleoside"
  source 1..26: mol_type = other RNA
tatatggatgtgtctgcggcgtttta

SEQ ID NO: 576 - RNA, 26 nt, synthetic construct
  misc_feature 1..26: note = HBV RNAi trigger sense strand
  modified_base 14..16: mod_base = OTHER; note = "2'-deoxy-3'-fluoro nucleoside"
  modified_base 1..13: mod_base = OTHER; note = "2'-O-Methyl nucleoside"
  modified_base 17..25: mod_base = OTHER; note = "2'-O-Methyl nucleoside"
  modified_base 26: mod_base = OTHER; note = "inverted nucleotide"
  modified_base 6..7: mod_base = OTHER; note = "phosphorothioate linked nucleoside"
  modified_base 26: mod_base = OTHER; note = "NAG13 modified nucleoside"
  source 1..26: mol_type = other RNA
tatatgatgtgtctgcggcgttttaa

SEQ ID NO: 577 - RNA, 26 nt, synthetic construct
  misc_feature 1..26: note = HBV RNAi trigger sense strand
  modified_base 14..16: mod_base = OTHER; note = "2'-deoxy-3'-fluoro nucleoside"
  modified_base 1..13: mod_base = OTHER; note = "2'-O-Methyl nucleoside"
  modified_base 17..25: mod_base = OTHER; note = "2'-O-Methyl nucleoside"
  modified_base 26: mod_base = OTHER; note = "inverted nucleotide"
  modified_base 6..7: mod_base = OTHER; note = "phosphorothioate linked nucleoside"
  modified_base 26: mod_base = OTHER; note = "NAG13 modified nucleoside"
  source 1..26: mol_type = other RNA
tatatgtgtctgcggcgttttatcaa

SEQ ID NO: 578 - RNA, 26 nt, synthetic construct
  misc_feature 1..26: note = HBV RNAi trigger sense strand
  modified_base 14..16: mod_base = OTHER; note = "2'-deoxy-3'-fluoro nucleoside"
  modified_base 1..13: mod_base = OTHER; note = "2'-O-Methyl nucleoside"
  modified_base 17..25: mod_base = OTHER; note = "2'-O-Methyl nucleoside"
  modified_base 26: mod_base = OTHER; note = "inverted nucleotide"
  modified_base 6..7: mod_base = OTHER; note = "phosphorothioate linked nucleoside"
  modified_base 26: mod_base = OTHER; note = "NAG13 modified nucleoside"
  source 1..26: mol_type = other RNA
tatattatcaaggtatgttgcccgta

SEQ ID NO: 579 - RNA, 26 nt, synthetic construct
  misc_feature 1..26: note = HBV RNAi trigger sense strand
  modified_base 14..16: mod_base = OTHER; note = "2'-deoxy-3'-fluoro nucleoside"
  modified_base 1..13: mod_base = OTHER; note = "2'-O-Methyl nucleoside"
  modified_base 17..25: mod_base = OTHER; note = "2'-O-Methyl nucleoside"
  modified_base 26: mod_base = OTHER; note = "inverted nucleotide"
  modified_base 6..7: mod_base = OTHER; note = "phosphorothioate linked nucleoside"
  modified_base 26: mod_base = OTHER; note = "NAG13 modified nucleoside"
  source 1..26: mol_type = other RNA
tatatatcaaggtatgttgcccgtta

SEQ ID NO: 580 - RNA, 26 nt, synthetic construct
  misc_feature 1..26: note = HBV RNAi trigger sense strand
  modified_base 14..16: mod_base = OTHER; note = "2'-deoxy-3'-fluoro nucleoside"
  modified_base 1..13: mod_base = OTHER; note = "2'-O-Methyl nucleoside"
  modified_base 17..25: mod_base = OTHER; note = "2'-O-Methyl nucleoside"
  modified_base 26: mod_base = OTHER; note = "inverted nucleotide"
  modified_base 6..7: mod_base = OTHER; note = "phosphorothioate linked nucleoside"
  modified_base 26: mod_base = OTHER; note = "NAG13 modified nucleoside"
  source 1..26: mol_type = other RNA
tatattcaaggtatgttgcccgttta

SEQ ID NO: 581 - RNA, 26 nt, synthetic construct
  misc_feature 1..26: note = HBV RNAi trigger sense strand
  modified_base 14..16: mod_base = OTHER; note = "2'-deoxy-3'-fluoro nucleoside"
  modified_base 1..13: mod_base = OTHER; note = "2'-O-Methyl nucleoside"
  modified_base 17..25: mod_base = OTHER; note = "2'-O-Methyl nucleoside"
  modified_base 26: mod_base = OTHER; note = "inverted nucleotide"
  modified_base 6..7: mod_base = OTHER; note = "phosphorothioate linked nucleoside"
  modified_base 26: mod_base = OTHER; note = "NAG13 modified nucleoside"
  source 1..26: mol_type = other RNA
tatatcaaggtatgttgcccgtttga

SEQ ID NO: 582 - RNA, 26 nt, synthetic construct
  misc_feature 1..26: note = HBV RNAi trigger sense strand
  modified_base 14..16: mod_base = OTHER; note = "2'-deoxy-3'-fluoro nucleoside"
  modified_base 1..13: mod_base = OTHER; note = "2'-O-Methyl nucleoside"
  modified_base 17..25: mod_base = OTHER; note = "2'-O-Methyl nucleoside"
  modified_base 26: mod_base = OTHER; note = "inverted nucleotide"
  modified_base 6..7: mod_base = OTHER; note = "phosphorothioate linked nucleoside"
  modified_base 26: mod_base = OTHER; note = "NAG13 modified nucleoside"
  source 1..26: mol_type = other RNA
tatataaggtatgttgcccgtttgta

SEQ ID NO: 583 - RNA, 26 nt, synthetic construct
  misc_feature 1..26: note = HBV RNAi trigger sense strand
  modified_base 14..16: mod_base = OTHER; note = "2'-deoxy-3'-fluoro nucleoside"
  modified_base 1..13: mod_base = OTHER; note = "2'-O-Methyl nucleoside"
  modified_base 17..25: mod_base = OTHER; note = "2'-O-Methyl nucleoside"
  modified_base 26: mod_base = OTHER; note = "inverted nucleotide"
  modified_base 6..7: mod_base = OTHER; note = "phosphorothioate linked nucleoside"
  modified_base 26: mod_base = OTHER; note = "NAG13 modified nucleoside"
  source 1..26: mol_type = other RNA
tatatgtatgttgcccgtttgtccta

SEQ ID NO: 584 - RNA, 26 nt, synthetic construct
  misc_feature 1..26: note = HBV RNAi trigger sense strand
  modified_base 14..16: mod_base = OTHER; note = "2'-deoxy-3'-fluoro nucleoside"
  modified_base 1..13: mod_base = OTHER; note = "2'-O-Methyl nucleoside"
  modified_base 17..25: mod_base = OTHER; note = "2'-O-Methyl nucleoside"
  modified_base 26: mod_base = OTHER; note = "inverted nucleotide"
  modified_base 6..7: mod_base = OTHER; note = "phosphorothioate linked nucleoside"
  modified_base 26: mod_base = OTHER; note = "NAG13 modified nucleoside"
  source 1..26: mol_type = other RNA
tatattcctggctcagtttactagta

SEQ ID NO: 585 - RNA, 26 nt, synthetic construct
  misc_feature 1..26: note = HBV RNAi trigger sense strand
  modified_base 14..16: mod_base = OTHER; note = "2'-deoxy-3'-fluoro nucleoside"
  modified_base 1..13: mod_base = OTHER; note = "2'-O-Methyl nucleoside"
  modified_base 17..25: mod_base = OTHER; note = "2'-O-Methyl nucleoside"
  modified_base 26: mod_base = OTHER; note = "inverted nucleotide"
  modified_base 6..7: mod_base = OTHER; note = "phosphorothioate linked nucleoside"
  modified_base 26: mod_base = OTHER; note = "NAG13 modified nucleoside"
  source 1..26: mol_type = other RNA
tatattggctcagtttactagtgcca

SEQ ID NO: 586 - RNA, 26 nt, synthetic construct
  misc_feature 1..26: note = HBV RNAi trigger sense strand
  modified_base 14..16: mod_base = OTHER; note = "2'-deoxy-3'-fluoro nucleoside"
  modified_base 1..13: mod_base = OTHER; note = "2'-O-Methyl nucleoside"
  modified_base 17..25: mod_base = OTHER; note = "2'-O-Methyl nucleoside"
  modified_base 26: mod_base = OTHER; note = "inverted nucleotide"
  modified_base 6..7: mod_base = OTHER; note = "phosphorothioate linked nucleoside"
  modified_base 26: mod_base = OTHER; note = "NAG13 modified nucleoside"
  source 1..26: mol_type = other RNA
tatatggctcagtttactagtgccaa

SEQ ID NO: 587 - RNA, 26 nt, synthetic construct
  misc_feature 1..26: note = HBV RNAi trigger sense strand
  modified_base 14..16: mod_base = OTHER; note = "2'-deoxy-3'-fluoro nucleoside"
  modified_base 1..13: mod_base = OTHER; note = "2'-O-Methyl nucleoside"
  modified_base 17..25: mod_base = OTHER; note = "2'-O-Methyl nucleoside"
  modified_base 26: mod_base = OTHER; note = "inverted nucleotide"
  modified_base 6..7: mod_base = OTHER; note = "phosphorothioate linked nucleoside"
  modified_base 26: mod_base = OTHER; note = "NAG13 modified nucleoside"
  source 1..26: mol_type = other RNA
tatatctcagtttactagtgccatta

SEQ ID NO: 588 - RNA, 26 nt, synthetic construct
  misc_feature 1..26: note = HBV RNAi trigger sense strand
  modified_base 14..16: mod_base = OTHER; note = "2'-deoxy-3'-fluoro nucleoside"
  modified_base 1..13: mod_base = OTHER; note = "2'-O-Methyl nucleoside"
  modified_base 17..25: mod_base = OTHER; note = "2'-O-Methyl nucleoside"
  modified_base 26: mod_base = OTHER; note = "inverted nucleotide"
  modified_base 6..7: mod_base = OTHER; note = "phosphorothioate linked nucleoside"
  modified_base 26: mod_base = OTHER; note = "NAG13 modified nucleoside"
  source 1..26: mol_type = other RNA
tatattcagtttactagtgccattta

SEQ ID NO: 589 - RNA, 26 nt, synthetic construct
  misc_feature 1..26: note = HBV RNAi trigger sense strand
  modified_base 14..16: mod_base = OTHER; note = "2'-deoxy-3'-fluoro nucleoside"
  modified_base 1..13: mod_base = OTHER; note = "2'-O-Methyl nucleoside"
  modified_base 17..25: mod_base = OTHER; note = "2'-O-Methyl nucleoside"
  modified_base 26: mod_base = OTHER; note = "inverted nucleotide"
  modified_base 6..7: mod_base = OTHER; note = "phosphorothioate linked nucleoside"
  modified_base 26: mod_base = OTHER; note = "NAG13 modified nucleoside"
  source 1..26: mol_type = other RNA
tatatcagtttactagtgccatttga

SEQ ID NO: 590 - RNA, 26 nt, synthetic construct
  misc_feature 1..26: note = HBV RNAi trigger sense strand
  modified_base 14..16: mod_base = OTHER; note = "2'-deoxy-3'-fluoro nucleoside"
  modified_base 1..13: mod_base = OTHER; note = "2'-O-Methyl nucleoside"
  modified_base 17..25: mod_base = OTHER; note = "2'-O-Methyl nucleoside"
  modified_base 26: mod_base = OTHER; note = "inverted nucleotide"
  modified_base 6..7: mod_base = OTHER; note = "phosphorothioate linked nucleoside"
  modified_base 26: mod_base = OTHER; note = "NAG13 modified nucleoside"
  source 1..26: mol_type = other RNA
tatatagtttactagtgccatttgta

SEQ ID NO: 591 - RNA, 26 nt, synthetic construct
  misc_feature 1..26: note = HBV RNAi trigger sense strand
  modified_base 14..16: mod_base = OTHER; note = "2'-deoxy-3'-fluoro nucleoside"
  modified_base 1..13: mod_base = OTHER; note = "2'-O-Methyl nucleoside"
  modified_base 17..25: mod_base = OTHER; note = "2'-O-Methyl nucleoside"
  modified_base 26: mod_base = OTHER; note = "inverted nucleotide"
  modified_base 6..7: mod_base = OTHER; note = "phosphorothioate linked nucleoside"
  modified_base 26: mod_base = OTHER; note = "NAG13 modified nucleoside"
  source 1..26: mol_type = other RNA
tatatttactagtgccatttgttcaa

SEQ ID NO: 592 - RNA, 26 nt, synthetic construct
  modified_base 26: mod_base = OTHER; note = thymine
  misc_feature 1..26: note = HBV RNAi trigger sense strand
  modified_base 14..16: mod_base = OTHER; note = "2'-deoxy-3'-fluoro nucleoside"
  modified_base 1..13: mod_base = OTHER; note = "2'-O-Methyl nucleoside"
  modified_base 17..25: mod_base = OTHER; note = "2'-O-Methyl nucleoside"
  modified_base 26: mod_base = OTHER; note = "inverted nucleotide"
  modified_base 6..7: mod_base = OTHER; note = "phosphorothioate linked nucleoside"
  modified_base 26: mod_base = OTHER; note = "NAG13 modified nucleoside"
  modified_base 26: mod_base = OTHER; note = thymine
  source 1..26: mol_type = other RNA
tatattactagtgccatttgttcagt

SEQ ID NO: 593 - RNA, 26 nt, synthetic construct
  misc_feature 1..26: note = HBV RNAi trigger sense strand
  modified_base 14..16: mod_base = OTHER; note = "2'-deoxy-3'-fluoro nucleoside"
  modified_base 1..13: mod_base = OTHER; note = "2'-O-Methyl nucleoside"
  modified_base 17..25: mod_base = OTHER; note = "2'-O-Methyl nucleoside"
  modified_base 26: mod_base = OTHER; note = "inverted nucleotide"
  modified_base 6..7: mod_base = OTHER; note = "phosphorothioate linked nucleoside"
  modified_base 26: mod_base = OTHER; note = "NAG13 modified nucleoside"
  source 1..26: mol_type = other RNA
tatatgtgccatttgttcagtggtta

SEQ ID NO: 594 - RNA, 26 nt, synthetic construct
  misc_feature 1..26: note = HBV RNAi trigger sense strand
  modified_base 14..16: mod_base = OTHER; note = "2'-deoxy-3'-fluoro nucleoside"
  modified_base 1..13: mod_base = OTHER; note = "2'-O-Methyl nucleoside"
  modified_base 17..25: mod_base = OTHER; note = "2'-O-Methyl nucleoside"
  modified_base 26: mod_base = OTHER; note = "inverted nucleotide"
  modified_base 6..7: mod_base = OTHER; note = "phosphorothioate linked nucleoside"
  modified_base 26: mod_base = OTHER; note = "NAG13 modified nucleoside"
  source 1..26: mol_type = other RNA
tatattgccatttgttcagtggttca

SEQ ID NO: 595 - RNA, 26 nt, synthetic construct
  misc_feature 1..26: note = HBV RNAi trigger sense strand
  modified_base 14..16: mod_base = OTHER; note = "2'-deoxy-3'-fluoro nucleoside"
  modified_base 1..13: mod_base = OTHER; note = "2'-O-Methyl nucleoside"
  modified_base 17..25: mod_base = OTHER; note = "2'-O-Methyl nucleoside"
  modified_base 26: mod_base = OTHER; note = "inverted nucleotide"
  modified_base 6..7: mod_base = OTHER; note = "phosphorothioate linked nucleoside"
  modified_base 26: mod_base = OTHER; note = "NAG13 modified nucleoside"
  source 1..26: mol_type = other RNA
tatatgccatttgttcagtggttcga

SEQ ID NO: 596 - RNA, 26 nt, synthetic construct
  misc_feature 1..26: note = HBV RNAi trigger sense strand
  modified_base 14..16: mod_base = OTHER; note = "2'-deoxy-3'-fluoro nucleoside"
  modified_base 1..13: mod_base = OTHER; note = "2'-O-Methyl nucleoside"
  modified_base 17..25: mod_base = OTHER; note = "2'-O-Methyl nucleoside"
  modified_base 26: mod_base = OTHER; note = "inverted nucleotide"
  modified_base 6..7: mod_base = OTHER; note = "phosphorothioate linked nucleoside"
  modified_base 26: mod_base = OTHER; note = "NAG13 modified nucleoside"
  source 1..26: mol_type = other RNA
tatatatgcaactttttcacctctga

SEQ ID NO: 597 - RNA, 26 nt, synthetic construct
  misc_feature 1..26: note = HBV RNAi trigger sense strand
  modified_base 14..16: mod_base = OTHER; note = "2'-deoxy-3'-fluoro nucleoside"
  modified_base 1..13: mod_base = OTHER; note = "2'-O-Methyl nucleoside"
  modified_base 17..25: mod_base = OTHER; note = "2'-O-Methyl nucleoside"
  modified_base 26: mod_base = OTHER; note = "inverted nucleotide"
  modified_base 6..7: mod_base = OTHER; note = "phosphorothioate linked nucleoside"
  modified_base 26: mod_base = OTHER; note = "NAG13 modified nucleoside"
  source 1..26: mol_type = other RNA
tatattgcaactttttcacctctgca

SEQ ID NO: 598 - RNA, 26 nt, synthetic construct
  misc_feature 1..26: note = HBV RNAi trigger sense strand
  modified_base 14..16: mod_base = OTHER; note = "2'-deoxy-3'-fluoro nucleoside"
  modified_base 1..13: mod_base = OTHER; note = "2'-O-Methyl nucleoside"
  modified_base 17..25: mod_base = OTHER; note = "2'-O-Methyl nucleoside"
  modified_base 26: mod_base = OTHER; note = "inverted nucleotide"
  modified_base 6..7: mod_base = OTHER; note = "phosphorothioate linked nucleoside"
  modified_base 26: mod_base = OTHER; note = "NAG13 modified nucleoside"
  source 1..26: mol_type = other RNA
tatatttcacctctgcctaatcatca

SEQ ID NO: 599 - RNA, 26 nt, synthetic construct
  misc_feature 1..26: note = HBV RNAi trigger sense strand
  modified_base 14..16: mod_base = OTHER; note = "2'-deoxy-3'-fluoro nucleoside"
  modified_base 1..13: mod_base = OTHER; note = "2'-O-Methyl nucleoside"
  modified_base 17..25: mod_base = OTHER; note = "2'-O-Methyl nucleoside"
  modified_base 26: mod_base = OTHER; note = "inverted nucleotide"
  modified_base 6..7: mod_base = OTHER; note = "phosphorothioate linked nucleoside"
  modified_base 26: mod_base = OTHER; note = "NAG13 modified nucleoside"
  source 1..26: mol_type = other RNA
tatatcacctctgcctaatcatctca

SEQ ID NO: 600 - RNA, 26 nt, synthetic construct
  misc_feature 1..26: note = HBV RNAi trigger sense strand
  modified_base 14..16: mod_base = OTHER; note = "2'-deoxy-3'-fluoro nucleoside"
  modified_base 1..13: mod_base = OTHER; note = "2'-O-Methyl nucleoside"
  modified_base 17..25: mod_base = OTHER; note = "2'-O-Methyl nucleoside"
  modified_base 26: mod_base = OTHER; note = "inverted nucleotide"
  modified_base 6..7: mod_base = OTHER; note = "phosphorothioate linked nucleoside"
  modified_base 26: mod_base = OTHER; note = "NAG13 modified nucleoside"
  source 1..26: mol_type = other RNA
tatatccacagagtctagactcgtga

SEQ ID NO: 601 - RNA, 26 nt, synthetic construct
  modified_base 26: mod_base = OTHER; note = thymine
  misc_feature 1..26: note = HBV RNAi trigger sense strand
  modified_base 14..16: mod_base = OTHER; note = "2'-deoxy-3'-fluoro nucleoside"
  modified_base 1..13: mod_base = OTHER; note = "2'-O-Methyl nucleoside"
  modified_base 17..25: mod_base = OTHER; note = "2'-O-Methyl nucleoside"
  modified_base 26: mod_base = OTHER; note = "inverted nucleotide"
  modified_base 6..7: mod_base = OTHER; note = "phosphorothioate linked nucleoside"
  modified_base 26: mod_base = OTHER; note = "NAG13 modified nucleoside"
  modified_base 26: mod_base = OTHER; note = thymine
  source 1..26: mol_type = other RNA
tatattcgtggtggacttctctcaat

SEQ ID NO: 602 - RNA, 26 nt, synthetic construct
  modified_base 26: mod_base = OTHER; note = thymine
  misc_feature 1..26: note = HBV RNAi trigger sense strand
  modified_base 14..16: mod_base = OTHER; note = "2'-deoxy-3'-fluoro nucleoside"
  modified_base 1..13: mod_base = OTHER; note = "2'-O-Methyl nucleoside"
  modified_base 17..25: mod_base = OTHER; note = "2'-O-Methyl nucleoside"
  modified_base 26: mod_base = OTHER; note = "inverted nucleotide"
  modified_base 6..7: mod_base = OTHER; note = "phosphorothioate linked nucleoside"
  modified_base 26: mod_base = OTHER; note = "NAG13 modified nucleoside"
  modified_base 26: mod_base = OTHER; note = thymine
  source 1..26: mol_type = other RNA
tatatcgtggtggacttctctcaatt

SEQ ID NO: 603 - RNA, 26 nt, synthetic construct
  misc_feature 1..26: note = HBV RNAi trigger sense strand
  modified_base 14..16: mod_base = OTHER; note = "2'-deoxy-3'-fluoro nucleoside"
  modified_base 1..13: mod_base = OTHER; note = "2'-O-Methyl nucleoside"
  modified_base 17..25: mod_base = OTHER; note = "2'-O-Methyl nucleoside"
  modified_base 26: mod_base = OTHER; note = "inverted nucleotide"
  modified_base 6..7: mod_base = OTHER; note = "phosphorothioate linked nucleoside"
  modified_base 26: mod_base = OTHER; note = "NAG13 modified nucleoside"
  source 1..26: mol_type = other RNA
tatatggacttctctcaattttctaa

SEQ ID NO: 604 - RNA, 26 nt, synthetic construct
  misc_feature 1..26: note = HBV RNAi trigger sense strand
  modified_base 14..16: mod_base = OTHER; note = "2'-deoxy-3'-fluoro nucleoside"
  modified_base 1..13: mod_base = OTHER; note = "2'-O-Methyl nucleoside"
  modified_base 17..25: mod_base = OTHER; note = "2'-O-Methyl nucleoside"
  modified_base 26: mod_base = OTHER; note = "inverted nucleotide"
  modified_base 6..7: mod_base = OTHER; note = "phosphorothioate linked nucleoside"
  modified_base 26: mod_base = OTHER; note = "NAG13 modified nucleoside"
  source 1..26: mol_type = other RNA
tatattgccaagtgtttgctgacgca

SEQ ID NO: 605 - RNA, 26 nt, synthetic construct
  misc_feature 1..26: note = HBV RNAi trigger sense strand
  modified_base 14..16: mod_base = OTHER; note = "2'-deoxy-3'-fluoro nucleoside"
  modified_base 1..13: mod_base = OTHER; note = "2'-O-Methyl nucleoside"
  modified_base 17..25: mod_base = OTHER; note = "2'-O-Methyl nucleoside"
  modified_base 26: mod_base = OTHER; note = "inverted nucleotide"
  modified_base 6..7: mod_base = OTHER; note = "phosphorothioate linked nucleoside"
  modified_base 26: mod_base = OTHER; note = "NAG13 modified nucleoside"
  source 1..26: mol_type = other RNA
tatatggctcctctgccgatccataa

SEQ ID NO: 606 - RNA, 26 nt, synthetic construct
  misc_feature 1..26: note = HBV RNAi trigger sense strand
  modified_base 14..16: mod_base = OTHER; note = "2'-deoxy-3'-fluoro nucleoside"
  modified_base 1..13: mod_base = OTHER; note = "2'-O-Methyl nucleoside"
  modified_base 17..25: mod_base = OTHER; note = "2'-O-Methyl nucleoside"
  modified_base 26: mod_base = OTHER; note = "inverted nucleotide"
  modified_base 6..7: mod_base = OTHER; note = "phosphorothioate linked nucleoside"
  modified_base 26: mod_base = OTHER; note = "NAG13 modified nucleoside"
  source 1..26: mol_type = other RNA
tatattcctctgccgatccatactga

SEQ ID NO: 607 - RNA, 26 nt, synthetic construct
  misc_feature 1..26: note = HBV RNAi trigger sense strand
  modified_base 14..16: mod_base = OTHER; note = "2'-deoxy-3'-fluoro nucleoside"
  modified_base 1..13: mod_base = OTHER; note = "2'-O-Methyl nucleoside"
  modified_base 17..25: mod_base = OTHER; note = "2'-O-Methyl nucleoside"
  modified_base 26: mod_base = OTHER; note = "inverted nucleotide"
  modified_base 6..7: mod_base = OTHER; note = "phosphorothioate linked nucleoside"
  modified_base 26: mod_base = OTHER; note = "NAG13 modified nucleoside"
  source 1..26: mol_type = other RNA
tatatgatccatactgcggaactcca

SEQ ID NO: 608 - RNA, 25 nt, synthetic construct
  modified_base 25: mod_base = OTHER; note = thymine
  misc_feature 1..25: note = HBV RNAi trigger sense strand
  modified_base 11..13: mod_base = OTHER; note = "2'-deoxy-3'-fluoro nucleoside"
  modified_base 1..10: mod_base = OTHER; note = "2'-O-Methyl nucleoside"
  modified_base 14..24: mod_base = OTHER; note = "2'-O-Methyl nucleoside"
  modified_base 25: mod_base = OTHER; note = "inverted nucleotide"
  modified_base 3..4: mod_base = OTHER; note = "phosphorothioate linked nucleoside",
  modified_base 25: mod_base = OTHER; note = "phosphorothioate linked nucleoside",
  modified_base 1: mod_base = OTHER; note = "NAG25 modified nucleoside"
  modified_base 25: mod_base = OTHER; note = thymine
  source 1..25: mol_type = other RNA
ttgcctgtaggcataaattggtatt

SEQ ID NO: 609 - RNA, 26 nt, synthetic construct
  misc_feature 1..26: note = HBV RNAi trigger sense strand
  modified_base 14..16: mod_base = OTHER; note = "2'-deoxy-3'-fluoro nucleoside"
  modified_base 1..13: mod_base = OTHER; note = "2'-O-Methyl nucleoside"
  modified_base 17..25: mod_base = OTHER; note = "2'-O-Methyl nucleoside"
  modified_base 26: mod_base = OTHER; note = "inverted nucleotide"
  modified_base 6..7: mod_base = OTHER; note = "phosphorothioate linked nucleoside"
  modified_base 1: mod_base = OTHER; note = "NAG25 modified nucleoside"
  source 1..26: mol_type = other RNA
tatatgcctgtaggcataaattggta

SEQ ID NO: 610 - RNA, 25 nt, synthetic construct
  modified_base 25: mod_base = OTHER; note = thymine
  misc_feature 1..25: note = HBV RNAi trigger sense strand
  modified_base 11..13: mod_base = OTHER; note = "2'-deoxy-3'-fluoro nucleoside"
  modified_base 1..10: mod_base = OTHER; note = "2'-O-Methyl nucleoside"
  modified_base 14..24: mod_base = OTHER; note = "2'-O-Methyl nucleoside"
  modified_base 25: mod_base = OTHER; note = "inverted nucleotide"
  modified_base 3..4: mod_base = OTHER; note = "phosphorothioate linked nucleoside",
  modified_base 25: mod_base = OTHER; note = "phosphorothioate linked nucleoside",
  modified_base 1: mod_base = OTHER; note = "NAG25 modified nucleoside"
  modified_base 25: mod_base = OTHER; note = thymine
  source 1..25: mol_type = other RNA
ttgtccgtgtgcacttcgcttcatt

SEQ ID NO: 611 - RNA, 25 nt, synthetic construct
  modified_base 25: mod_base = OTHER; note = thymine
  misc_feature 1..25: note = HBV RNAi trigger sense strand
  modified_base 11..13: mod_base = OTHER; note = "2'-deoxy-3'-fluoro nucleoside"
  modified_base 1..10: mod_base = OTHER; note = "2'-O-Methyl nucleoside"
  modified_base 14..24: mod_base = OTHER; note = "2'-O-Methyl nucleoside"
  modified_base 25: mod_base = OTHER; note = "inverted nucleotide"
  modified_base 3..4: mod_base = OTHER; note = "phosphorothioate linked nucleoside",
  modified_base 25: mod_base = OTHER; note = "phosphorothioate linked nucleoside",
  modified_base 1: mod_base = OTHER; note = "NAG25 modified nucleoside"
  modified_base 25: mod_base = OTHER; note = thymine
  source 1..25: mol_type = other RNA
ttggtatgttgcccgtttgtccatt

SEQ ID NO: 612 - RNA, 19 nt, synthetic construct
  misc_feature 1..19: note = HBV RNAi trigger sense strand
  modified_base 5: mod_base = OTHER; note = "2'-deoxy-3'-fluoro nucleoside"
  modified_base 7..9: mod_base = OTHER; note = "2'-deoxy-3'-fluoro nucleoside"
  modified_base 1..4: mod_base = OTHER; note = "2'-O-Methyl nucleoside"
  modified_base 6: mod_base = OTHER; note = "2'-O-Methyl nucleoside"
  modified_base 10..19: mod_base = OTHER; note = "2'-O-Methyl nucleoside"
  modified_base 2..3: mod_base = OTHER; note = "phosphorothioate linked nucleoside"
  modified_base 19: mod_base = OTHER; note = "NAG13 modified nucleoside"
  source 1..19: mol_type = other RNA
gtgtgcacttcgcttcaca

SEQ ID NO: 613 - RNA, 21 nt, synthetic construct
  misc_feature 1..21: note = HBV RNAi trigger sense strand
  modified_base 7: mod_base = OTHER; note = "2'-deoxy-3'-fluoro nucleoside"
  modified_base 9..11: mod_base = OTHER; note = "2'-deoxy-3'-fluoro nucleoside"
  modified_base 16..17: mod_base = OTHER; note = "2'-deoxy-3'-fluoro nucleoside"
  modified_base 1..6: mod_base = OTHER; note = "2'-O-Methyl nucleoside"
  modified_base 8: mod_base = OTHER; note = "2'-O-Methyl nucleoside"
  modified_base 12..15: mod_base = OTHER; note = "2'-O-Methyl nucleoside"
  modified_base 18..21: mod_base = OTHER; note = "2'-O-Methyl nucleoside"
  modified_base 2..3: mod_base = OTHER; note = "phosphorothioate linked nucleoside"
  modified_base 21: mod_base = OTHER; note = "NAG13 modified nucleoside"
  source 1..21: mol_type = other RNA
ggtggacttctctcaatttta

SEQ ID NO: 614 - RNA, 19 nt, synthetic construct
  misc_feature 1..19: note = HBV RNAi trigger sense strand
  modified_base 5: mod_base = OTHER; note = "2'-deoxy-3'-fluoro nucleoside"
  modified_base 7..9: mod_base = OTHER; note = "2'-deoxy-3'-fluoro nucleoside"
  modified_base 1..4: mod_base = OTHER; note = "2'-O-Methyl nucleoside"
  modified_base 6: mod_base = OTHER; note = "2'-O-Methyl nucleoside"
  modified_base 10..17: mod_base = OTHER; note = "2'-O-Methyl nucleoside"
  modified_base 19: mod_base = OTHER; note = "inverted nucleotide"
  modified_base 18: mod_base = OTHER; note = "2'-MOE nucleotide"
  modified_base 2..3: mod_base = OTHER; note = "phosphorothioate linked nucleoside"
  modified_base 1: mod_base = OTHER; note = "NAG25 modified nucleoside"
  source 1..19: mol_type = other RNA
gtgtgcacttcgcttcaca

SEQ ID NO: 615 - RNA, 21 nt, synthetic construct
  modified_base 20: mod_base = OTHER; note = thymine
  misc_feature 1..21: note = HBV RNAi trigger sense strand
  modified_base 7: mod_base = OTHER; note = "2'-deoxy-3'-fluoro nucleoside"
  modified_base 9..11: mod_base = OTHER; note = "2'-deoxy-3'-fluoro nucleoside"
  modified_base 16..17: mod_base = OTHER; note = "2'-deoxy-3'-fluoro nucleoside"
  modified_base 1..6: mod_base = OTHER; note = "2'-O-Methyl nucleoside"
  modified_base 8: mod_base = OTHER; note = "2'-O-Methyl nucleoside"
  modified_base 12..15: mod_base = OTHER; note = "2'-O-Methyl nucleoside"
  modified_base 18..19: mod_base = OTHER; note = "2'-O-Methyl nucleoside"
  modified_base 21: mod_base = OTHER; note = "inverted nucleotide"
  modified_base 20: mod_base = OTHER; note = "2'-MOE nucleotide"
  modified_base 2..3: mod_base = OTHER; note = "phosphorothioate linked nucleoside"
  modified_base 1: mod_base = OTHER; note = "NAG25 modified nucleoside"
  modified_base 20: mod_base = OTHER; note = thymine
  source 1..21: mol_type = other RNA
ggtggacttctctcaatttta

SEQ ID NO: 616 - RNA, 26 nt, synthetic construct
  misc_feature 1..26: note = HBV RNAi trigger sense strand
  modified_base 14..16: mod_base = OTHER; note = "2'-deoxy-3'-fluoro nucleoside"
  modified_base 1..13: mod_base = OTHER; note = "2'-O-Methyl nucleoside"
  modified_base 17..24: mod_base = OTHER; note = "2'-O-Methyl nucleoside"
  modified_base 26: mod_base = OTHER; note = "inverted nucleotide"
  modified_base 25: mod_base = OTHER; note = "2'-MOE nucleotide"
  modified_base 7: mod_base = OTHER; note = "phosphorothioate linked nucleoside"
  modified_base 1: mod_base = OTHER; note = "NAG25 modified nucleoside"
  source 1..26: mol_type = other RNA
cgcggtccgtgtgcacttcgcttcaa

SEQ ID NO: 617 - RNA, 26 nt, synthetic construct
  misc_feature 1..26: note = HBV RNAi trigger sense strand
  modified_base 14..16: mod_base = OTHER; note = "2'-deoxy-3'-fluoro nucleoside"
  modified_base 1..13: mod_base = OTHER; note = "2'-O-Methyl nucleoside"
  modified_base 17..24: mod_base = OTHER; note = "2'-O-Methyl nucleoside"
  modified_base 26: mod_base = OTHER; note = "inverted nucleotide"
  modified_base 25: mod_base = OTHER; note = "2'-MOE nucleotide"
  modified_base 7: mod_base = OTHER; note = "phosphorothioate linked nucleoside"
  modified_base 1: mod_base = OTHER; note = "NAG25 modified nucleoside"
  source 1..26: mol_type = other RNA
gcggtccgtgtgcacttcgcttcaca

SEQ ID NO: 618 - RNA, 26 nt, synthetic construct
  misc_feature 1..26: note = HBV RNAi trigger sense strand
  modified_base 14..16: mod_base = OTHER; note = "2'-deoxy-3'-fluoro nucleoside"
  modified_base 1..13: mod_base = OTHER; note = "2'-O-Methyl nucleoside"
  modified_base 17..24: mod_base = OTHER; note = "2'-O-Methyl nucleoside"
  modified_base 26: mod_base = OTHER; note = "inverted nucleotide"
  modified_base 25: mod_base = OTHER; note = "2'-MOE nucleotide"
  modified_base 7: mod_base = OTHER; note = "phosphorothioate linked nucleoside"
  modified_base 1: mod_base = OTHER; note = "NAG25 modified nucleoside"
  source 1..26: mol_type = other RNA
gcggatgtgtctgcggcgttttatca

SEQ ID NO: 619 - RNA, 26 nt, synthetic construct
  modified_base 25: mod_base = OTHER; note = thymine
  misc_feature 1..26: note = HBV RNAi trigger sense strand
  modified_base 14..16: mod_base = OTHER; note = "2'-deoxy-3'-fluoro nucleoside"
  modified_base 1..13: mod_base = OTHER; note = "2'-O-Methyl nucleoside"
  modified_base 17..24: mod_base = OTHER; note = "2'-O-Methyl nucleoside"
  modified_base 26: mod_base = OTHER; note = "inverted nucleotide"
  modified_base 25: mod_base = OTHER; note = "2'-MOE nucleotide"
  modified_base 7: mod_base = OTHER; note = "phosphorothioate linked nucleoside"
  modified_base 1: mod_base = OTHER; note = "NAG25 modified nucleoside"
  modified_base 25: mod_base = OTHER; note = thymine
  source 1..26: mol_type = other RNA
gcgtgtgtctgcggcgttttatcata

SEQ ID NO: 620 - RNA, 26 nt, synthetic construct
  modified_base 26: mod_base = OTHER; note = thymine
  misc_feature 1..26: note = HBV RNAi trigger sense strand
  modified_base 14..16: mod_base = OTHER; note = "2'-deoxy-3'-fluoro nucleoside"
  modified_base 1..13: mod_base = OTHER; note = "2'-O-Methyl nucleoside"
  modified_base 17..24: mod_base = OTHER; note = "2'-O-Methyl nucleoside"
  modified_base 26: mod_base = OTHER; note = "inverted nucleotide"
  modified_base 25: mod_base = OTHER; note = "2'-MOE nucleotide"
  modified_base 7: mod_base = OTHER; note = "phosphorothioate linked nucleoside"
  modified_base 1: mod_base = OTHER; note = "NAG25 modified nucleoside"
  modified_base 26: mod_base = OTHER; note = thymine
  source 1..26: mol_type = other RNA
gcggtccgtgtgcacttcgcttcact

SEQ ID NO: 621 - RNA, 26 nt, synthetic construct
  modified_base 25..26: mod_base = OTHER; note = thymine
  misc_feature 1..26: note = HBV RNAi trigger sense strand
  modified_base 14..16: mod_base = OTHER; note = "2'-deoxy-3'-fluoro nucleoside"
  modified_base 1..13: mod_base = OTHER; note = "2'-O-Methyl nucleoside"
  modified_base 17..24: mod_base = OTHER; note = "2'-O-Methyl nucleoside"
  modified_base 26: mod_base = OTHER; note = "inverted nucleotide"
  modified_base 25: mod_base = OTHER; note = "2'-MOE nucleotide"
  modified_base 7: mod_base = OTHER; note = "phosphorothioate linked nucleoside"
  modified_base 1: mod_base = OTHER; note = "NAG25 modified nucleoside"
  modified_base 25..26: mod_base = OTHER; note = thymine
  source 1..26: mol_type = other RNA
gcgtgtgtctgcggcgttttatcatt

SEQ ID NO: 622 - RNA, 26 nt, synthetic construct
  misc_feature 1..26: note = HBV RNAi trigger sense strand
  modified_base 14..16: mod_base = OTHER; note = "2'-deoxy-3'-fluoro nucleoside"
  modified_base 1..13: mod_base = OTHER; note = "2'-O-Methyl nucleoside"
  modified_base 17..24: mod_base = OTHER; note = "2'-O-Methyl nucleoside"
  modified_base 26: mod_base = OTHER; note = "inverted nucleotide"
  modified_base 25: mod_base = OTHER; note = "2'-MOE nucleotide"
  modified_base 7: mod_base = OTHER; note = "phosphorothioate linked nucleoside"
  modified_base 1: mod_base = OTHER; note = "NAG25 modified nucleoside"
  source 1..26: mol_type = other RNA
gcgcggtccgtgtgcacttcgcttca

SEQ ID NO: 623 - RNA, 26 nt, synthetic construct
  misc_feature 1..26: note = HBV RNAi trigger sense strand
  modified_base 14..16: mod_base = OTHER; note = "2'-deoxy-3'-fluoro nucleoside"
  modified_base 1..13: mod_base = OTHER; note = "2'-O-Methyl nucleoside"
  modified_base 17..24: mod_base = OTHER; note = "2'-O-Methyl nucleoside"
  modified_base 26: mod_base = OTHER; note = "inverted nucleotide"
  modified_base 25: mod_base = OTHER; note = "2'-MOE nucleotide"
  modified_base 7: mod_base = OTHER; note = "phosphorothioate linked nucleoside"
  modified_base 1: mod_base = OTHER; note = "NAG25 modified nucleoside"
  source 1..26: mol_type = other RNA
gcgaaggtatgttgcccgtttgtcca

SEQ ID NO: 624 - RNA, 26 nt, synthetic construct
  modified_base 25: mod_base = OTHER; note = thymine
  misc_feature 1..26: note = HBV RNAi trigger sense strand
  modified_base 14..16: mod_base = OTHER; note = "2'-deoxy-3'-fluoro nucleoside"
  modified_base 1..13: mod_base = OTHER; note = "2'-O-Methyl nucleoside"
  modified_base 17..24: mod_base = OTHER; note = "2'-O-Methyl nucleoside"
  modified_base 26: mod_base = OTHER; note = "inverted nucleotide"
  modified_base 25: mod_base = OTHER; note = "2'-MOE nucleotide"
  modified_base 7: mod_base = OTHER; note = "phosphorothioate linked nucleoside"
  modified_base 1: mod_base = OTHER; note = "NAG25 modified nucleoside"
  modified_base 25: mod_base = OTHER; note = thymine
  source 1..26: mol_type = other RNA
gcggaggctgtaggcataaattggta

SEQ ID NO: 625 - RNA, 19 nt, synthetic construct
  modified_base 19: mod_base = OTHER; note = thymine
  misc_feature 1..19: note = HBV RNAi trigger sense strand
  modified_base 2: mod_base = OTHER; note = "2'-deoxy-3'-fluoro nucleoside"
  modified_base 4: mod_base = OTHER; note = "2'-deoxy-3'-fluoro nucleoside"
  modified_base 6: mod_base = OTHER; note = "2'-deoxy-3'-fluoro nucleoside"
  modified_base 8: mod_base = OTHER; note = "2'-deoxy-3'-fluoro nucleoside"
  modified_base 10: mod_base = OTHER; note = "2'-deoxy-3'-fluoro nucleoside"
  modified_base 12: mod_base = OTHER; note = "2'-deoxy-3'-fluoro nucleoside"
  modified_base 14: mod_base = OTHER; note = "2'-deoxy-3'-fluoro nucleoside"
  modified_base 16: mod_base = OTHER; note = "2'-deoxy-3'-fluoro nucleoside"
  modified_base 18: mod_base = OTHER; note = "2'-deoxy-3'-fluoro nucleoside"
  modified_base 1: mod_base = OTHER; note = "2'-O-Methyl nucleoside"
  modified_base 3: mod_base = OTHER; note = "2'-O-Methyl nucleoside"
  modified_base 5: mod_base = OTHER; note = "2'-O-Methyl nucleoside"
  modified_base 7: mod_base = OTHER; note = "2'-O-Methyl nucleoside"
  modified_base 9: mod_base = OTHER; note = "2'-O-Methyl nucleoside"
  modified_base 11: mod_base = OTHER; note = "2'-O-Methyl nucleoside"
  modified_base 13: mod_base = OTHER; note = "2'-O-Methyl nucleoside"
  modified_base 15: mod_base = OTHER; note = "2'-O-Methyl nucleoside"
  modified_base 17: mod_base = OTHER; note = "2'-O-Methyl nucleoside"
  modified_base 19: mod_base = OTHER; note = "inverted nucleotide"
  modified_base 19: mod_base = OTHER; note = thymine
  source 1..19: mol_type = other RNA
tgtaggcataaattggtat

SEQ ID NO: 626 - RNA, 19 nt, synthetic construct
  modified_base 19: mod_base = OTHER; note = thymine
  misc_feature 1..19: note = HBV RNAi trigger sense strand
  modified_base 2: mod_base = OTHER; note = "2'-deoxy-3'-fluoro nucleoside"
  modified_base 4: mod_base = OTHER; note = "2'-deoxy-3'-fluoro nucleoside"
  modified_base 6: mod_base = OTHER; note = "2'-deoxy-3'-fluoro nucleoside"
  modified_base 8: mod_base = OTHER; note = "2'-deoxy-3'-fluoro nucleoside"
  modified_base 10: mod_base = OTHER; note = "2'-deoxy-3'-fluoro nucleoside"
  modified_base 12: mod_base = OTHER; note = "2'-deoxy-3'-fluoro nucleoside"
  modified_base 14: mod_base = OTHER; note = "2'-deoxy-3'-fluoro nucleoside"
  modified_base 16: mod_base = OTHER; note = "2'-deoxy-3'-fluoro nucleoside"
  modified_base 18: mod_base = OTHER; note = "2'-deoxy-3'-fluoro nucleoside"
  modified_base 1: mod_base = OTHER; note = "2'-O-Methyl nucleoside"
  modified_base 3: mod_base = OTHER; note = "2'-O-Methyl nucleoside"
  modified_base 5: mod_base = OTHER; note = "2'-O-Methyl nucleoside"
  modified_base 7: mod_base = OTHER; note = "2'-O-Methyl nucleoside"
  modified_base 9: mod_base = OTHER; note = "2'-O-Methyl nucleoside"
  modified_base 11: mod_base = OTHER; note = "2'-O-Methyl nucleoside"
  modified_base 13: mod_base = OTHER; note = "2'-O-Methyl nucleoside"
  modified_base 15: mod_base = OTHER; note = "2'-O-Methyl nucleoside"
  modified_base 17: mod_base = OTHER; note = "2'-O-Methyl nucleoside"
  modified_base 19: mod_base = OTHER; note = "inverted nucleotide"
  modified_base 19: mod_base = OTHER; note = thymine
  source 1..19: mol_type = other RNA
cctctgcctaatcatctat

SEQ ID NO: 627 - RNA, 19 nt, synthetic construct
  modified_base 19: mod_base = OTHER; note = thymine
  misc_feature 1..19: note = HBV RNAi trigger sense strand
  modified_base 2: mod_base = OTHER; note = "2'-deoxy-3'-fluoro nucleoside"
  modified_base 4: mod_base = OTHER; note = "2'-deoxy-3'-fluoro nucleoside"
  modified_base 6: mod_base = OTHER; note = "2'-deoxy-3'-fluoro nucleoside"
  modified_base 7..8: mod_base = OTHER; note = "2'-deoxy-3'-fluoro nucleoside"
  modified_base 10: mod_base = OTHER; note = "2'-deoxy-3'-fluoro nucleoside"
  modified_base 12: mod_base = OTHER; note = "2'-deoxy-3'-fluoro nucleoside"
  modified_base 14: mod_base = OTHER; note = "2'-deoxy-3'-fluoro nucleoside"
  modified_base 16: mod_base = OTHER; note = "2'-deoxy-3'-fluoro nucleoside"
  modified_base 18: mod_base = OTHER; note = "2'-deoxy-3'-fluoro nucleoside"
  modified_base 1: mod_base = OTHER; note = "2'-O-Methyl nucleoside"
  modified_base 3: mod_base = OTHER; note = "2'-O-Methyl nucleoside"
  modified_base 5: mod_base = OTHER; note = "2'-O-Methyl nucleoside"
  modified_base 9: mod_base = OTHER; note = "2'-O-Methyl nucleoside"
  modified_base 11: mod_base = OTHER; note = "2'-O-Methyl nucleoside"
  modified_base 13: mod_base = OTHER; note = "2'-O-Methyl nucleoside"
  modified_base 15: mod_base = OTHER; note = "2'-O-Methyl nucleoside"
  modified_base 17: mod_base = OTHER; note = "2'-O-Methyl nucleoside"
  modified_base 19: mod_base = OTHER; note = "inverted nucleotide"
  modified_base 19: mod_base = OTHER; note = thymine
  source 1..19: mol_type = other RNA
ctgcggcgttttatcatat

SEQ ID NO: 628 - RNA, 19 nt, synthetic construct
  modified_base 19: mod_base = OTHER; note = thymine
  misc_feature 1..19: note = HBV RNAi trigger sense strand
  modified_base 2: mod_base = OTHER; note = "2'-deoxy-3'-fluoro nucleoside"
  modified_base 4: mod_base = OTHER; note = "2'-deoxy-3'-fluoro nucleoside"
  modified_base 6: mod_base = OTHER; note = "2'-deoxy-3'-fluoro nucleoside"
  modified_base 7..8: mod_base = OTHER; note = "2'-deoxy-3'-fluoro nucleoside"
  modified_base 10: mod_base = OTHER; note = "2'-deoxy-3'-fluoro nucleoside"
  modified_base 12: mod_base = OTHER; note = "2'-deoxy-3'-fluoro nucleoside"
  modified_base 14: mod_base = OTHER; note = "2'-deoxy-3'-fluoro nucleoside"
  modified_base 16: mod_base = OTHER; note = "2'-deoxy-3'-fluoro nucleoside"
  modified_base 18: mod_base = OTHER; note = "2'-deoxy-3'-fluoro nucleoside"
  modified_base 1: mod_base = OTHER; note = "2'-O-Methyl nucleoside"
  modified_base 3: mod_base = OTHER; note = "2'-O-Methyl nucleoside"
  modified_base 5: mod_base = OTHER; note = "2'-O-Methyl nucleoside"
  modified_base 9: mod_base = OTHER; note = "2'-O-Methyl nucleoside"
  modified_base 11: mod_base = OTHER; note = "2'-O-Methyl nucleoside"
  modified_base 13: mod_base = OTHER; note = "2'-O-Methyl nucleoside"
  modified_base 15: mod_base = OTHER; note = "2'-O-Methyl nucleoside"
  modified_base 17: mod_base = OTHER; note = "2'-O-Methyl nucleoside"
  modified_base 19: mod_base = OTHER; note = "inverted nucleotide"
  modified_base 19: mod_base = OTHER; note = thymine
  source 1..19: mol_type = other RNA
tgtaggcataaattggtat

SEQ ID NO: 629 - RNA, 22 nt, synthetic construct
  misc_feature 1..22: note = HBV RNAi trigger sense strand
  modified_base 7..9: mod_base = OTHER; note = "2'-deoxy-3'-fluoro nucleoside"
  modified_base 1..6: mod_base = OTHER; note = "2'-O-Methyl nucleoside"
  modified_base 10..21: mod_base = OTHER; note = "2'-O-Methyl nucleoside"
  modified_base 22: mod_base = OTHER; note = "inverted abasic nucleotide"
  modified_base 1: mod_base = OTHER; note = "phosphorothioate linked nucleoside"
  modified_base 2: mod_base = OTHER; note = "phosphorothioate linked nucleoside"
  modified_base 22: mod_base = OTHER; note = "phosphorothioate linked nucleoside"
  modified_base 1: mod_base = OTHER; note = "NAG25 modified nucleoside"
  source 1..22: mol_type = other RNA
ctgtaggcataaattggtattn

SEQ ID NO: 630 - RNA, 22 nt, synthetic construct
  misc_feature 1..22: note = HBV RNAi trigger sense strand
  modified_base 9..11: mod_base = OTHER; note = "2'-deoxy-3'-fluoro nucleoside"
  modified_base 1..8: mod_base = OTHER; note = "2'-O-Methyl nucleoside"
  modified_base 12..21: mod_base = OTHER; note = "2'-O-Methyl nucleoside"
  modified_base 22: mod_base = OTHER; note = "inverted abasic nucleotide"
  modified_base 1: mod_base = OTHER; note = "phosphorothioate linked nucleoside"
  modified_base 2: mod_base = OTHER; note = "phosphorothioate linked nucleoside"
  modified_base 22: mod_base = OTHER; note = "phosphorothioate linked nucleoside"
  modified_base 1: mod_base = OTHER; note = "NAG25 modified nucleoside"
  source 1..22: mol_type = other RNA
gcctgtaggcataaattggtan

SEQ ID NO: 631 - RNA, 21 nt, synthetic construct
  misc_feature 1..21: note = HBV RNAi trigger sense strand
  modified_base 9..11: mod_base = OTHER; note = "2'-deoxy-3'-fluoro nucleoside"
  modified_base 1..8: mod_base = OTHER; note = "2'-O-Methyl nucleoside"
  modified_base 12..20: mod_base = OTHER; note = "2'-O-Methyl nucleoside"
  modified_base 21: mod_base = OTHER; note = "inverted nucleotide"
  modified_base 1: mod_base = OTHER; note = "phosphorothioate linked nucleoside"
  modified_base 2: mod_base = OTHER; note = "phosphorothioate linked nucleoside"
  modified_base 21: mod_base = OTHER; note = "phosphorothioate linked nucleoside"
  modified_base 1: mod_base = OTHER; note = "NAG25 modified nucleoside"
  source 1..21: mol_type = other RNA
gcctgtaggcataaattggta

SEQ ID NO: 632 - RNA, 22 nt, synthetic construct
  misc_feature 1..22: note = HBV RNAi trigger sense strand
  modified_base 9..11: mod_base = OTHER; note = "2'-deoxy-3'-fluoro nucleoside"
  modified_base 1..8: mod_base = OTHER; note = "2'-O-Methyl nucleoside"
  modified_base 12..20: mod_base = OTHER; note = "2'-O-Methyl nucleoside"
  modified_base 22: mod_base = OTHER; note = "inverted abasic nucleotide"
  modified_base 21: mod_base = OTHER; note = "2'-MOE nucleotide"
  modified_base 1: mod_base = OTHER; note = "phosphorothioate linked nucleoside"
  modified_base 2: mod_base = OTHER; note = "phosphorothioate linked nucleoside"
  modified_base 22: mod_base = OTHER; note = "phosphorothioate linked nucleoside"
  modified_base 1: mod_base = OTHER; note = "NAG25 modified nucleoside"
  source 1..22: mol_type = other RNA
gcctgtaggcataaattggtan

SEQ ID NO: 633 - RNA, 22 nt, synthetic construct
  modified_base 20: mod_base = OTHER; note = thymine
  misc_feature 1..22: note = HBV RNAi trigger sense strand
  modified_base 9..11: mod_base = OTHER; note = "2'-deoxy-3'-fluoro nucleoside"
  modified_base 1..8: mod_base = OTHER; note = "2'-O-Methyl nucleoside"
  modified_base 12..19: mod_base = OTHER; note = "2'-O-Methyl nucleoside"
  modified_base 22: mod_base = OTHER; note = "inverted abasic nucleotide"
  modified_base 20..21: mod_base = OTHER; note = "2'-MOE nucleotide"
  modified_base 1: mod_base = OTHER; note = "phosphorothioate linked nucleoside"
  modified_base 2: mod_base = OTHER; note = "phosphorothioate linked nucleoside"
  modified_base 22: mod_base = OTHER; note = "phosphorothioate linked nucleoside"
  modified_base 1: mod_base = OTHER; note = "NAG25 modified nucleoside"
  modified_base 20: mod_base = OTHER; note = thymine
  source 1..22: mol_type = other RNA
gcctgtaggcataaattggtan

SEQ ID NO: 634 - RNA, 22 nt, synthetic construct
  misc_feature 1..22: note = HBV RNAi trigger sense strand
  modified_base 9..11: mod_base = OTHER; note = "2'-deoxy-3'-fluoro nucleoside"
  modified_base 1..8: mod_base = OTHER; note = "2'-O-Methyl nucleoside"
  modified_base 12..21: mod_base = OTHER; note = "2'-O-Methyl nucleoside"
  modified_base 22: mod_base = OTHER; note = "inverted abasic nucleotide"
  modified_base 1: mod_base = OTHER; note = "phosphorothioate linked nucleoside"
  modified_base 2: mod_base = OTHER; note = "phosphorothioate linked nucleoside"
  modified_base 22: mod_base = OTHER; note = "phosphorothioate linked nucleoside"
  modified_base 1: mod_base = OTHER; note = "NAG25 modified nucleoside"
  source 1..22: mol_type = other RNA
aactgtaggcataaattggtan

SEQ ID NO: 635 - RNA, 22 nt, synthetic construct
  misc_feature 1..22: note = HBV RNAi trigger sense strand
  modified_base 9..11: mod_base = OTHER; note = "2'-deoxy-3'-fluoro nucleoside"
  modified_base 1..8: mod_base = OTHER; note = "2'-O-Methyl nucleoside"
  modified_base 12..21: mod_base = OTHER; note = "2'-O-Methyl nucleoside"
  modified_base 22: mod_base = OTHER; note = "inverted abasic nucleotide"
  modified_base 1: mod_base = OTHER; note = "phosphorothioate linked nucleoside"
  modified_base 2: mod_base = OTHER; note = "phosphorothioate linked nucleoside"
  modified_base 22: mod_base = OTHER; note = "phosphorothioate linked nucleoside"
  modified_base 1: mod_base = OTHER; note = "NAG25 modified nucleoside"
  source 1..22: mol_type = other RNA
tcgtggtggacttctctcaatn

SEQ ID NO: 636 - RNA, 22 nt, synthetic construct
  misc_feature 1..22: note = HBV RNAi trigger sense strand
  modified_base 9..11: mod_base = OTHER; note = "2'-deoxy-3'-fluoro nucleoside"
  modified_base 1..8: mod_base = OTHER; note = "2'-O-Methyl nucleoside"
  modified_base 12..21: mod_base = OTHER; note = "2'-O-Methyl nucleoside"
  modified_base 22: mod_base = OTHER; note = "inverted abasic nucleotide"
  modified_base 1: mod_base = OTHER; note = "phosphorothioate linked nucleoside"
  modified_base 2: mod_base = OTHER; note = "phosphorothioate linked nucleoside"
  modified_base 22: mod_base = OTHER; note = "phosphorothioate linked nucleoside"
  modified_base 1: mod_base = OTHER; note = "NAG25 modified nucleoside"
  source 1..22: mol_type = other RNA
aagtggtggacttctctcaatn

SEQ ID NO: 637 - RNA, 22 nt, synthetic construct
  modified_base 21: mod_base = OTHER; note = thymine
  misc_feature 1..22: note = HBV RNAi trigger sense strand
  modified_base 9..11: mod_base = OTHER; note = "2'-deoxy-3'-fluoro nucleoside"
  modified_base 1..8: mod_base = OTHER; note = "2'-O-Methyl nucleoside"
  modified_base 12..19: mod_base = OTHER; note = "2'-O-Methyl nucleoside"
  modified_base 22: mod_base = OTHER; note = "inverted abasic nucleotide"
  modified_base 20..21: mod_base = OTHER; note = "2'-MOE nucleotide"
  modified_base 1: mod_base = OTHER; note = "phosphorothioate linked nucleoside"
  modified_base 2: mod_base = OTHER; note = "phosphorothioate linked nucleoside"
  modified_base 22: mod_base = OTHER; note = "phosphorothioate linked nucleoside"
  modified_base 1: mod_base = OTHER; note = "NAG25 modified nucleoside"
  modified_base 21: mod_base = OTHER; note = thymine
  source 1..22: mol_type = other RNA
tcgtggtggacttctctcaatn

SEQ ID NO: 638 - RNA, 22 nt, synthetic construct
  misc_feature 1..22: note = HBV RNAi trigger sense strand
  modified_base 9..11: mod_base = OTHER; note = "2'-deoxy-3'-fluoro nucleoside"
  modified_base 1..8: mod_base = OTHER; note = "2'-O-Methyl nucleoside"
  modified_base 12..21: mod_base = OTHER; note = "2'-O-Methyl nucleoside"
  modified_base 22: mod_base = OTHER; note = "inverted abasic nucleotide"
  modified_base 1: mod_base = OTHER; note = "phosphorothioate linked nucleoside"
  modified_base 2: mod_base = OTHER; note = "phosphorothioate linked nucleoside"
  modified_base 22: mod_base = OTHER; note = "phosphorothioate linked nucleoside"
  modified_base 1: mod_base = OTHER; note = "NAG25 modified nucleoside"
  source 1..22: mol_type = other RNA
cgtggtggacttctctcaattn

SEQ ID NO: 639 - RNA, 22 nt, synthetic construct
  misc_feature 1..22: note = HBV RNAi trigger sense strand
  modified_base 9..11: mod_base = OTHER; note = "2'-deoxy-3'-fluoro nucleoside"
  modified_base 1..8: mod_base = OTHER; note = "2'-O-Methyl nucleoside"
  modified_base 12..21: mod_base = OTHER; note = "2'-O-Methyl nucleoside"
  modified_base 22: mod_base = OTHER; note = "inverted abasic nucleotide"
  modified_base 1: mod_base = OTHER; note = "phosphorothioate linked nucleoside"
  modified_base 2: mod_base = OTHER; note = "phosphorothioate linked nucleoside"
  modified_base 22: mod_base = OTHER; note = "phosphorothioate linked nucleoside"
  modified_base 1: mod_base = OTHER; note = "NAG25 modified nucleoside"
  source 1..22: mol_type = other RNA
aatggtggacttctctcaattn

SEQ ID NO: 640 - RNA, 22 nt, synthetic construct
  modified_base 20..21: mod_base = OTHER; note = thymine
  misc_feature 1..22: note = HBV RNAi trigger sense strand
  modified_base 9..11: mod_base = OTHER; note = "2'-deoxy-3'-fluoro nucleoside"
  modified_base 1..8: mod_base = OTHER; note = "2'-O-Methyl nucleoside"
  modified_base 12..19: mod_base = OTHER; note = "2'-O-Methyl nucleoside"
  modified_base 22: mod_base = OTHER; note = "inverted abasic nucleotide"
  modified_base 20..21: mod_base = OTHER; note = "2'-MOE nucleotide"
  modified_base 1: mod_base = OTHER; note = "phosphorothioate linked nucleoside"
  modified_base 2: mod_base = OTHER; note = "phosphorothioate linked nucleoside"
  modified_base 22: mod_base = OTHER; note = "phosphorothioate linked nucleoside"
  modified_base 1: mod_base = OTHER; note = "NAG25 modified nucleoside"
  modified_base 20..21: mod_base = OTHER; note = thymine
  source 1..22: mol_type = other RNA
cgtggtggacttctctcaattn

SEQ ID NO: 641 - RNA, 22 nt, synthetic construct
  misc_feature 1..22: note = HBV RNAi trigger sense strand
  modified_base 9..11: mod_base = OTHER; note = "2'-deoxy-3'-fluoro nucleoside"
  modified_base 1..8: mod_base = OTHER; note = "2'-O-Methyl nucleoside"
  modified_base 12..21: mod_base = OTHER; note = "2'-O-Methyl nucleoside"
  modified_base 22: mod_base = OTHER; note = "inverted abasic nucleotide"
  modified_base 1: mod_base = OTHER; note = "phosphorothioate linked nucleoside"
  modified_base 2: mod_base = OTHER; note = "phosphorothioate linked nucleoside"
  modified_base 22: mod_base = OTHER; note = "phosphorothioate linked nucleoside"
  modified_base 1: mod_base = OTHER; note = "NAG25 modified nucleoside"
  source 1..22: mol_type = other RNA
ggacttctctcaattttctaan

SEQ ID NO: 642 - RNA, 22 nt, synthetic construct
  misc_feature 1..22: note = HBV RNAi trigger sense strand
  modified_base 9..11: mod_base = OTHER; note = "2'-deoxy-3'-fluoro nucleoside"
  modified_base 1..8: mod_base = OTHER; note = "2'-O-Methyl nucleoside"
  modified_base 12..21: mod_base = OTHER; note = "2'-O-Methyl nucleoside"
  modified_base 22: mod_base = OTHER; note = "inverted abasic nucleotide"
  modified_base 1: mod_base = OTHER; note = "phosphorothioate linked nucleoside"
  modified_base 2: mod_base = OTHER; note = "phosphorothioate linked nucleoside"
  modified_base 22: mod_base = OTHER; note = "phosphorothioate linked nucleoside"
  modified_base 1: mod_base = OTHER; note = "NAG25 modified nucleoside"
  source 1..22: mol_type = other RNA
cgtggtggacttctctcaatan

SEQ ID NO: 643 - RNA, 22 nt, synthetic construct
  misc_feature 1..22: note = HBV RNAi trigger sense strand
  modified_base 9..11: mod_base = OTHER; note = "2'-deoxy-3'-fluoro nucleoside"
  modified_base 1..8: mod_base = OTHER; note = "2'-O-Methyl nucleoside"
  modified_base 12..21: mod_base = OTHER; note = "2'-O-Methyl nucleoside"
  modified_base 22: mod_base = OTHER; note = "inverted abasic nucleotide"
  modified_base 1: mod_base = OTHER; note = "phosphorothioate linked nucleoside"
  modified_base 2: mod_base = OTHER; note = "phosphorothioate linked nucleoside"
  modified_base 22: mod_base = OTHER; note = "phosphorothioate linked nucleoside"
  modified_base 1: mod_base = OTHER; note = "NAG25 modified nucleoside"
  source 1..22: mol_type = other RNA
tcgtggtggacttctctcaaan

SEQ ID NO: 644 - protein, 26 aa, Apis florea
GIGAILKVLATGLPTLISWIKNKRKQ

SEQ ID NO: 645 - protein, 26 aa, synthetic construct
  REGION 1..26: note = Melittin-like peptide
AIGAILKVLATGLPTLISWIKNKRKQ

SEQ ID NO: 646 - protein, 26 aa, synthetic construct
  REGION 1..26: note = Melittin-like peptide
CIGAILKVLATGLPTLISWIKNKRKQ

SEQ ID NO: 647 - protein, 26 aa, synthetic construct
  REGION 1..26: note = Melittin-like peptide
FIGAILKVLATGLPTLISWIKNKRKQ

SEQ ID NO: 648 - protein, 26 aa, synthetic construct
  REGION 1..26: note = Melittin-like peptide
HIGAILKVLATGLPTLISWIKNKRKQ

SEQ ID NO: 649 - protein, 26 aa, synthetic construct
  REGION 1..26: note = Melittin-like peptide
IIGAILKVLATGLPTLISWIKNKRKQ

SEQ ID NO: 650 - protein, 26 aa, synthetic construct
  REGION 1..26: note = Melittin-like peptide
LIGAILKVLATGLPTLISWIKNKRKQ

SEQ ID NO: 651 - protein, 26 aa, synthetic construct
  REGION 1..26: note = Melittin-like peptide
  VARIANT 1: note = Xaa is Nle
XIGAILKVLATGLPTLISWIKNKRKQ

SEQ ID NO: 652 - protein, 26 aa, synthetic construct
  REGION 1..26: note = Melittin-like peptide
VIGAILKVLATGLPTLISWIKNKRKQ

SEQ ID NO: 653 - protein, 26 aa, synthetic construct
  REGION 1..26: note = Melittin-like peptide
WIGAILKVLATGLPTLISWIKNKRKQ

SEQ ID NO: 654 - protein, 26 aa, synthetic construct
  REGION 1..26: note = Melittin-like peptide
YIGAILKVLATGLPTLISWIKNKRKQ

SEQ ID NO: 655 - protein, 26 aa, synthetic construct
  REGION 1..26: note = D-form Apis florea melittin sequence
GIGAILKVLACGLPTLISWIKNKRKQ

SEQ ID NO: 656 - protein, 26 aa, synthetic construct
  REGION 1..26: note = Melittin-like peptide
GIGAILKVLATLLPTLISWIKNKRKQ

SEQ ID NO: 657 - protein, 26 aa, synthetic construct
  REGION 1..26: note = Melittin-like peptide
GIGAILKVLATWLPTLISWIKNKRKQ

SEQ ID NO: 658 - protein, 26 aa, synthetic construct
  REGION 1..26: note = Melittin-like peptide
GIGAILKVLATGLPTLISWIKTKRKQ

SEQ ID NO: 659 - protein, 26 aa, synthetic construct
  REGION 1..26: note = Melittin-like peptide
YIGAILNVLATGLPTLISWIKNKRKQ

SEQ ID NO: 660 - protein, 26 aa, synthetic construct
  REGION 1..26: note = Melittin-like peptide
YIGAILAVLATGLPTLISWIKNKRKQ

SEQ ID NO: 661 - protein, 26 aa, synthetic construct
  REGION 1..26: note = Melittin-like peptide
LIGAILSVLATGLPTLISWIKNKRKQ

SEQ ID NO: 662 - protein, 26 aa, synthetic construct
  REGION 1..26: note = Melittin-like peptide
LIGAILRVLATGLPTLISWIKNKRKQ

SEQ ID NO: 663 - protein, 26 aa, synthetic construct
  REGION 1..26: note = Melittin-like peptide
LIGAILHVLATGLPTLISWIKNKRKQ

SEQ ID NO: 664 - protein, 26 aa, synthetic construct
  REGION 1..26: note = Melittin-like peptide
LIGAILKVLACGLPTLISWIKNKRKQ

SEQ ID NO: 665 - protein, 26 aa, synthetic construct
  REGION 1..26: note = Melittin-like peptide
LIGAILKVLATLLPTLISWIKNKRKQ

SEQ ID NO: 666 - protein, 26 aa, synthetic construct
  REGION 1..26: note = Melittin-like peptide
YIGAILKVLATGLLTLISWIKNKRKQ

SEQ ID NO: 667 - protein, 26 aa, synthetic construct
  REGION 1..26: note = Melittin-like peptide
LIGAILKVLATGLPCLISWIKNKRKQ

SEQ ID NO: 668 - protein, 26 aa, synthetic construct
  REGION 1..26: note = Melittin-like peptide
LIGAILKVLATGLPTLICWIKNKRKQ

SEQ ID NO: 669 - protein, 26 aa, synthetic construct
  REGION 1..26: note = Melittin-like peptide
YIGAILKVLATGLPTLISAIKNKRKQ

SEQ ID NO: 670 - protein, 26 aa, synthetic construct
  REGION 1..26: note = Melittin-like peptide
GIGAILKVLACGLPTLISWLKNKRKQ

SEQ ID NO: 671 - protein, 26 aa, synthetic construct
  REGION 1..26: note = Melittin-like peptide
YIGAILKVLATGLPTLISWIANKRKQ

SEQ ID NO: 672 - protein, 26 aa, synthetic construct
  REGION 1..26: note = Melittin-like peptide
YIGAILKVLATGLPTLISWIKNARKQ

SEQ ID NO: 673 - protein, 26 aa, synthetic construct
  REGION 1..26: note = Melittin-like peptide
LIGAILKVLATGLPTLISWIKNKAKQ

SEQ ID NO: 674 - protein, 26 aa, synthetic construct
  REGION 1..26: note = Melittin-like peptide
YIGAILKVLATGLPTLISWIKNKRAQ

SEQ ID NO: 675 - protein, 26 aa, synthetic construct
  REGION 1..26: note = Melittin-like peptide
YIGAILKVLATGLPTLISWIKNKRKC

SEQ ID NO: 676 - protein, 26 aa, synthetic construct
  REGION 1..26: note = Melittin-like peptide
LLGAILKVLACGLPTLISWIKNKRKQ

SEQ ID NO: 677 - protein, 26 aa, synthetic construct
  REGION 1..26: note = Melittin-like peptide
LIGALLKVLACGLPTLISWIKNKRKQ

SEQ ID NO: 678 - protein, 26 aa, synthetic construct
  REGION 1..26: note = Melittin-like peptide
YIGAILAVLATGLPTLISWIANKRKQ

SEQ ID NO: 679 - protein, 26 aa, synthetic construct
  REGION 1..26: note = Melittin-like peptide
YIGAILAVLATGLPTLISWIKNARKQ

SEQ ID NO: 680 - protein, 26 aa, synthetic construct
  REGION 1..26: note = Melittin-like peptide
LIGAILKVLACGLPTLLSWIKNKRKQ

SEQ ID NO: 681 - protein, 26 aa, synthetic construct
  REGION 1..26: note = Melittin-like peptide
LIGAILKVLACGLPTLICWIKNKRKQ

SEQ ID NO: 682 - protein, 26 aa, synthetic construct
  REGION 1..26: note = Melittin-like peptide
GIGAILKVLACGLPGLIGWIKNKRKQ

SEQ ID NO: 683 - protein, 26 aa, synthetic construct
  REGION 1..26: note = Melittin-like peptide
GIGAILKVLACGLPALIAWIKNKRKQ

SEQ ID NO: 684 - protein, 26 aa, synthetic construct
  REGION 1..26: note = Melittin-like peptide
YIGAILAVLATGLPTLISWIANARKQ

SEQ ID NO: 685 - protein, 26 aa, synthetic construct
  REGION 1..26: note = Melittin-like peptide
YIAAILKVLAAALATLISWIKNKRKQ

SEQ ID NO: 686 - protein, 26 aa, synthetic construct
  REGION 1..26: note = Melittin-like peptide
LLGALLKVLATGLPTLLSWLKNKRKQ

SEQ ID NO: 687 - protein, 26 aa, synthetic construct
  REGION 1..26: note = Melittin-like peptide
  VARIANT 2: note = Xaa is Nle
  VARIANT 5: note = Xaa is Nle
  VARIANT 17: note = Xaa is Nle
  VARIANT 20: note = Xaa is Nle
LXGAXLKVLATGLPTLXSWXKNKRKQ

SEQ ID NO: 688 - protein, 26 aa, synthetic construct
  REGION 1..26: note = Melittin-like peptide
LVGAVLKVLATGLPTLVSWVKNKRKQ

SEQ ID NO: 689 - protein, 26 aa, synthetic construct
  REGION 1..26: note = Melittin-like peptide
GLGALLKVLACGLPTLLSWLKNKRKQ

SEQ ID NO: 690 - protein, 26 aa, synthetic construct
  REGION 1..26: note = Melittin-like peptide
  VARIANT 2: note = Xaa is Nle
  VARIANT 5: note = Xaa is Nle
  VARIANT 17: note = Xaa is Nle
  VARIANT 20: note = Xaa is Nle
GXGAXLKVLACGLPTLXSWXKNKRKQ

SEQ ID NO: 691 - protein, 31 aa, synthetic construct
  REGION 1..31: note = Melittin-like peptide
CEDDLLLGAILKVLATGLPTLISWIKNKRKQ

SEQ ID NO: 692 - protein, 31 aa, synthetic construct
  REGION 1..31: note = Melittin-like peptide
CLVVLIVVAILKVLATGLPTLISWIKNKRKQ

SEQ ID NO: 693 - protein, 26 aa, Apis mellifera
GIGAVLKVLTTGLPALISWIKRKRQQ

SEQ ID NO: 694 - protein, 27 aa, synthetic construct
  REGION 1..27: note = Melittin-like peptide
CLIGAILKVLATGLPTLISWIKNKRKQ

SEQ ID NO: 695 - protein, 27 aa, synthetic construct
  REGION 1..27: note = Melittin-like peptide
  VARIANT 2: note = Xaa is Nle
CXIGAILKVLATGLPTLISWIKNKRKQ

SEQ ID NO: 696 - protein, 27 aa, synthetic construct
  REGION 1..27: note = Melittin-like peptide
GLIGAILKVLATGLPTLISWIKNKRKQ

SEQ ID NO: 697 - protein, 27 aa, synthetic construct
  REGION 1..27: note = Melittin-like peptide
LLIGAILKVLATGLPTLISWIKNKRKQ

SEQ ID NO: 698 - protein, 29 aa, synthetic construct
  REGION 1..29: note = Melittin-like peptide
KLKLIGAILKVLATGLPTLISWIKNKRKQ

SEQ ID NO: 699 - protein, 29 aa, synthetic construct
  REGION 1..29: note = Melittin-like peptide
KLKYIGAILKVLATGLPTLISWIKNKRKQ

SEQ ID NO: 700 - protein, 30 aa, synthetic construct
  REGION 1..30: note = Melittin-like peptide
CKLKLIGAILKVLATGLPTLISWIKNKRKQ

SEQ ID NO: 701 - protein, 30 aa, synthetic construct
  REGION 1..30: note = Melittin-like peptide
  VARIANT 5: note = Xaa is Nle
CKLKXIGAILKVLATGLPTLISWIKNKRKQ

SEQ ID NO: 702 - protein, 30 aa, synthetic construct
  REGION 1..30: note = Melittin-like peptide
GKLKLIGAILKVLATGLPTLISWIKNKRKQ

SEQ ID NO: 703 - protein, 30 aa, synthetic construct
  REGION 1..30: note = D-form Melittin-like peptide
CPANLIGAILKVLATGLPTLISWIKNKRKQ

SEQ ID NO: 704 - protein, 31 aa, synthetic construct
  REGION 1..31: note = Melittin-like peptide
DEPLRAIGAILKVLATGLPTLISWIKNKRKQ

SEQ ID NO: 705 - protein, 27 aa, synthetic construct
  REGION 1..27: note = Melittin-like peptide
GIGAILKVLATGLPTLISWIKNKRKQC

SEQ ID NO: 706 - protein, 27 aa, synthetic construct
  REGION 1..27: note = Melittin-like peptide
LIGAILKVLATGLPTLISWIKNKRKQC

SEQ ID NO: 707 - protein, 27 aa, synthetic construct
  REGION 1..27: note = Melittin-like peptide
  VARIANT 1: note = Xaa is Nle
XIGAILKVLATGLPTLISWIKNKRKQC

SEQ ID NO: 708 - protein, 30 aa, synthetic construct
  REGION 1..30: note = Melittin-like peptide
LIGAILKVLATGLPTLISWIKNKRKQKLKC

SEQ ID NO: 709 - protein, 34 aa, synthetic construct
  REGION 1..34: note = Melittin-like peptide
YIGAILKVLATGLPTLISWIKNKRKQPLGIAGQC

SEQ ID NO: 710 - protein, 31 aa, synthetic construct
  REGION 1..31: note = Melittin-like peptide
LIGAILKVLATGLPTLISWIKNKRKQKKKKK

SEQ ID NO: 711 - protein, 31 aa, synthetic construct
  REGION 1..31: note = Melittin-like peptide
YIGAILKVLATGLPTLISWIKNKRKQGFKGC

SEQ ID NO: 712 - protein, 30 aa, synthetic construct
  REGION 1..30: note = Melittin-like peptide
CFKLIGAILKVLATGLPTLISWIKNKRKQC

SEQ ID NO: 713 - protein, 25 aa, synthetic construct
  REGION 1..25: note = Melittin-like peptide
FGAILKVLATGLPTLISWIKNKRKQ

SEQ ID NO: 714 - protein, 23 aa, synthetic construct
  REGION 1..23: note = Melittin-like peptide
LIGAILKVLATGLPTLISWIKNK

SEQ ID NO: 715 - protein, 21 aa, synthetic construct
  REGION 1..21: note = Melittin-like peptide
LIGAVLKVLTTGLPALISWIK

SEQ ID NO: 716 - protein, 23 aa, synthetic construct
  REGION 1..23: note = Melittin-like peptide
LIGAVLKVLTTGLPALISWIKGE

SEQ ID NO: 717 - protein, 26 aa, synthetic construct
  REGION 1..26: note = Melittin-like peptide
QKRKNKIWSILTPLGTALVKLIAGIL

SEQ ID NO: 718 - protein, 29 aa, synthetic construct
  REGION 1..29: note = Melittin-like peptide
KLKQKRKNKIWSILTPLGTALVKLIAGIL

SEQ ID NO: 719 - protein, 27 aa, synthetic construct
  REGION 1..27: note = Melittin-like peptide
GIGAVLKVLTTGLPALISWISRKKRQQ

SEQ ID NO: 720 - protein, 25 aa, synthetic construct
  REGION 1..25: note = Melittin-like peptide
GIGARLKVLTTGLPRISWIKRKRQQ

SEQ ID NO: 721 - protein, 26 aa, synthetic construct
  REGION 1..26: note = Melittin-like peptide
GIGAILKVLSTGLPALISWIKRKRQE

SEQ ID NO: 722 - protein, 26 aa, synthetic construct
  REGION 1..26: note = Melittin-like peptide
GIGAVLKVLTTGLPALIGWIKRKRQQ

SEQ ID NO: 723 - protein, 26 aa, synthetic construct
  REGION 1..26: note = Melittin-like peptide
GIGAVLKVLATGLPALISWIKRKRQQ

SEQ ID NO: 724 - protein, 26 aa, synthetic construct
  REGION 1..26: note = Melittin-like peptide
GIGAVLKVLSTGLPALISWIKRKRQQ

SEQ ID NO: 725 - protein, 26 aa, synthetic construct
  REGION 1..26: note = Melittin-like peptide
GIGAILRVLATGLPTLISWIKNKRKQ

SEQ ID NO: 726 - protein, 26 aa, synthetic construct
  REGION 1..26: note = Melittin-like peptide
GIGAILKVLATGLPTLISWIKRKRKQ

SEQ ID NO: 727 - protein, 26 aa, synthetic construct
  REGION 1..26: note = Melittin-like peptide
GIGAILKVLATGLPTLISWIKKKKQQ

SEQ ID NO: 728 - protein, 32 aa, synthetic construct
  REGION 1..32: note = Melittin-like peptide
GIGAILKVLATGLPTLISWIKNKRKQGSKKKK

SEQ ID NO: 729 - protein, 28 aa, synthetic construct
  REGION 1..28: note = Melittin-like peptide
KKGIGAILKVLATGLPTLISWIKNKRKQ

SEQ ID NO: 730 - protein, 26 aa, synthetic construct
  REGION 1..26: note = Melittin-like peptide
GIGAILEVLATGLPTLISWIKNKRKQ

SEQ ID NO: 731 - protein, 24 aa, synthetic construct
  REGION 1..24: note = Melittin-like peptide
GIGAVLKVLTTGLPALISWIKRKR

SEQ ID NO: 732 - protein, 22 aa, synthetic construct
  REGION 1..22: note = Melittin-like peptide
GIGAVLKVLTTGLPALISWIKR

SEQ ID NO: 733 - protein, 26 aa, synthetic construct
  REGION 1..26: note = Melittin-like peptide
CIGAVLKVLTTGLPALISWIKRKRQQ

SEQ ID NO: 734 - protein, 26 aa, synthetic construct
  REGION 1..26: note = Melittin-like peptide
QQRKRKIWSILAPLGTTLVKLVAGIG

SEQ ID NO: 735 - protein, 26 aa, synthetic construct
  REGION 1..26: note = Melittin-like peptide
QQRKRKIWSILAPLGTTLVKLVAGIC

SEQ ID NO: 736 - protein, 26 aa, synthetic construct
  REGION 1..26: note = Melittin-like peptide
QQKKKKIWSILAPLGTTLVKLVAGIC

SEQ ID NO: 737 - protein, 26 aa, synthetic construct
  REGION 1..26: note = Melittin-like peptide
QKRKNKIWSILTPLGTALVKLIAGIG

SEQ ID NO: 738 - protein, 26 aa, synthetic construct
  REGION 1..26: note = Melittin-like peptide
QQRKRKIWSILAALGTTLVKLVAGIC

SEQ ID NO: 739 - protein, 26 aa, synthetic construct
  REGION 1..26: note = D-form Melittin-like peptide
QKRKNKIWSILTPLGTALVKLIAGIG

SEQ ID NO: 740 - DNA, 18 bp, synthetic construct
  misc_feature 1..18: note = Hepatitis B virus PCR primer
  source 1..18: mol_type = other DNA
gccggacctgcatgacta

SEQ ID NO: 741 - DNA, 25 bp, synthetic construct
  misc_feature 1..25: note = Hepatitis B virus PCR primer
  source 1..25: mol_type = other DNA
ggtacagcaacaggagggatacata

SEQ ID NO: 742 - DNA, 16 bp, synthetic construct
  misc_feature 1..16: note = Hepatitis B virus probe
  source 1..16: mol_type = other DNA
ctgctcaaggaacctc

SEQ ID NO: 743 - DNA, 23 bp, synthetic construct
  misc_feature 1..23: note = HCR gene PCR primer
  source 1..23: mol_type = other DNA
catgccacctccaacatccactc

SEQ ID NO: 744 - DNA, 24 bp, synthetic construct
  misc_feature 1..24: note = HCR gene PCR primer
  source 1..24: mol_type = other DNA
ggcatagccacttactgacgactc

SEQ ID NO: 745 - DNA, 28 bp, synthetic construct
  misc_feature 1..28: note = HCR gene probe
  source 1..28: mol_type = other DNA
ttgtcctggcgtggtttaggtagtgtga

SEQ ID NO: 746 - DNA, 18 bp, synthetic construct
  misc_feature 1..18: note = Hepatitis B virus PCR primer
  source 1..18: mol_type = other DNA
gccggacctgcatgacta

SEQ ID NO: 747 - DNA, 25 bp, synthetic construct
  misc_feature 1..25: note = Hepatitis B virus PCR primer
  source 1..25: mol_type = other DNA
ggtacagcaacaggagggatacata

SEQ ID NO: 748 - DNA, 16 bp, synthetic construct
  misc_feature 1..16: note = Hepatitis B virus probe
  source 1..16: mol_type = other DNA
ctgctcaaggaacctc

SEQ ID NO: 749 - RNA, 20 nt, synthetic construct
  modified_base 20: mod_base = OTHER; note = thymine
  misc_feature 1..20: note = Hepatitis B virus PNA standard
  modified_base 1..19: mod_base = OTHER; note = "2'-hydroxy corresponding nucleoside"
  modified_base 20: mod_base = OTHER; note = thymine
  source 1..20: mol_type = other RNA
ctgtaggcataaattggtat

SEQ ID NO: 750 - RNA, 21 nt, synthetic construct
  modified_base 1: mod_base = OTHER; note = thymine
  modified_base 20..21: mod_base = OTHER; note = thymine
  misc_feature 1..21: note = Hepatitis B virus PNA standard
  modified_base 2..19: mod_base = OTHER; note = "2'-hydroxy corresponding nucleoside"
  modified_base 1: mod_base = OTHER; note = thymine
  modified_base 20: mod_base = OTHER; note = thymine
  modified_base 21: mod_base = OTHER; note = thymine
  source 1..21: mol_type = other RNA
taccaatttatgcctacagtt

SEQ ID NO: 751 - RNA, 20 nt, synthetic construct
  modified_base 20: mod_base = OTHER; note = thymine
  misc_feature 1..20: note = Hepatitis B virus PNA standard
  modified_base 1..19: mod_base = OTHER; note = "2'-hydroxy corresponding nucleoside"
  modified_base 20: mod_base = OTHER; note = thymine
  source 1..20: mol_type = other RNA
acctctgcctaatcatctat

SEQ ID NO: 752 - RNA, 21 nt, synthetic construct
  modified_base 1: mod_base = OTHER; note = thymine
  modified_base 20..21: mod_base = OTHER; note = thymine
  misc_feature 1..21: note = Hepatitis B virus PNA standard
  modified_base 2..19: mod_base = OTHER; note = "2'-hydroxy corresponding nucleoside"
  modified_base 1: mod_base = OTHER; note = thymine
  modified_base 20: mod_base = OTHER; note = thymine
  modified_base 21: mod_base = OTHER; note = thymine
  source 1..21: mol_type = other RNA
tagatgattaggcagaggttt

SEQ ID NO: 753 - DNA, 15 bp, synthetic construct
  misc_feature 1..15: note = Peptide nucleic acid probe
  source 1..15: mol_type = other DNA
ctgtaggcataaatt

SEQ ID NO: 754 - DNA, 15 bp, synthetic construct
  misc_feature 1..15: note = Peptide nucleic acid probe
  source 1..15: mol_type = other DNA
acctctgcctaatca

SEQ ID NO: 755 - DNA, 20 bp, synthetic construct
  misc_feature 1..20: note = Hepatitis B virus PCR primer
  source 1..20: mol_type = other DNA
cgaggcaggtcccctagaag

SEQ ID NO: 756 - DNA, 16 bp, synthetic construct
  misc_feature 1..16: note = Hepatitis B virus PCR primer
  source 1..16: mol_type = other DNA
tgcgacgcggygattg

SEQ ID NO: 757 - DNA, 23 bp, synthetic construct
  misc_feature 1..23: note = Hepatitis B virus probe
  source 1..23: mol_type = other DNA
agaactccctcgcctcgcagacg

SEQ ID NO: 758 - DNA, 21 bp, synthetic construct
  misc_feature 1..21: note = Hepatitis B virus PCR primer
  source 1..21: mol_type = other DNA
ccgtctgtgccttctcatctg

SEQ ID NO: 759 - DNA, 29 bp, synthetic construct
  misc_feature 1..29: note = Hepatitis B virus PCR primer
  source 1..29: mol_type = other DNA
agtccaagagtyctcttatgyaagacctt

SEQ ID NO: 760 - DNA, 26 bp, synthetic construct
  misc_feature 1..26: note = Hepatitis B virus probe
  source 1..26: mol_type = other DNA
ccgtgtgcacttcgcttcacctctgc

SEQ ID NO: 761 - RNA, 23 nt, synthetic construct
  modified_base 23: mod_base = OTHER; note = thymine
  misc_feature 1..23: note = Firefly luciferase siRNA strand
  modified_base 1..22: mod_base = OTHER; note = "2'-hydroxy corresponding nucleoside"
  modified_base 23: mod_base = OTHER; note = thymine
  source 1..23: mol_type = other RNA
tatcttacgctgagtacttcgat

SEQ ID NO: 762 - RNA, 21 nt, synthetic construct
  modified_base 20..21: mod_base = OTHER; note = thymine
  misc_feature 1..21: note = Firefly luciferase siRNA strand
  modified_base 1..19: mod_base = OTHER; note = "2'-hydroxy corresponding nucleoside"
  modified_base 20..21: mod_base = OTHER; note = thymine
  source 1..21: mol_type = other RNA
tcgaagtactcagcgtaagtt

SEQ ID NO: 763 - DNA, 25 bp, synthetic construct
  misc_feature 1..25: note = mouse GADPH PCR primer
  source 1..25: mol_type = other DNA
gcccctatcctatcaacacttccgg

SEQ ID NO: 764 - DNA, 20 bp, synthetic construct
  misc_feature 1..20: note = mouse GADPH PCR primer
  source 1..20: mol_type = other DNA
ttcgtctgcgaggcgaggga

SEQ ID NO: 765 - DNA, 19 bp, synthetic construct
  misc_feature 1..19: note = mouse GADPH PCR primer
  source 1..19: mol_type = other DNA
tctggaaagctgtggcgtg

SEQ ID NO: 766 - DNA, 20 bp, synthetic construct
  misc_feature 1..20: note = mouse GADPH PCR primer
  source 1..20: mol_type = other DNA
ccagtgagcttcccgttcag
